(19) United States
(12) Patent Application Publication
(10) Pub. No.: US 2009/0263803 A1
(43) Pub. Date: Oct. 22, 2009

(54) MIRNAS DIFFERENTIALLY EXPRESSED IN LYMPH NODES FROM CANCER PATIENTS

(76) Inventors: Sylvie Beaudenon, Austin, TX (US); Laura Elizondo, Austin, TX (US); Martina Doleshal, Austin, TX (US); David Brown, Austin, TX (US); Emmanuel Labourier, Austin, TX (US)

Correspondence Address: Fullbright & Jaworski L.L.P., 600 Congress Avenue, Suite 2400, Austin, TX, 78701, US

(21) Appl. No.: 12/368,053

(22) Filed: Feb. 9, 2009

Related U.S. Application Data
(60) Provisional application No. 61/027,198, filed on Feb. 8, 2008.

(51) Int. Cl. C12Q 1/68

(52) U.S. Cl. 435/6

(57) ABSTRACT

The present invention provides diagnostics and/or prognostic methods by identifying miRNAs that are differentially expressed or mis-regulated in various states of diseased, normal, cancerous, and/or abnormal tissues, including but not limited to cervix, skin, colon, breast, bladder, esophagus, liver, ovary, prostate, lung, pancreas, thyroid, kidney, stomach, testicle, uterus, spleen, tongue, brain, thymus, trachea and/or small intestine. In certain apsects, differential miRNA expression is initially determined by comparing miRNA expression between a normal tissue and cancer negative lymph node (LNneg), a normal tissue and a cancer positive lymph node (LNpos), a cancerous tissue and LNneg and/or LNpos, LNneg and LNpos. The methods of the invention are used to identify the presence or absence of non-lymphoid cells from other organs or tissues, and/or metastatic cancer cells present in lymph nodes.

[0001] This application claims priority to U.S. Provisional Patent Application Ser. No. 61/027,198 filed Feb. 8, 2008, which is incorporated herein by reference in its entirety.

### BACKGROUND OF THE INVENTION

[0002] I. Field of the Invention

[0003] The present invention relates generally to the fields of molecular biology and oncology. More particularly, it concerns methods and compositions involving microRNA (miRNAs) molecules and cancer prognosis and staging. Certain aspects of the invention include applications for miRNAs in diagnosis and staging of various cancers and in patient monitoring.

[0004] II. Background

[0005] Cancer remains a serious public health problem in the United States and other developed countries. Currently, one in four deaths in the United States is due to cancer (Jemal et al., 2007). Cancers of the lung/bronchus, prostate, and colon/rectum in men, and cancers of the lung/bronchus, breast, and colon/rectum in women are the most common fatal cancers in the US, accounting for half of all cancer deaths (Jemal et al., 2007). Only a handful of treatments are available for specific types of cancer, and these provide no guarantee of success. To be most effective, cancer treatment requires not only an early detection of the malignancy, but a reliable assessment of the severity of the malignancy.

[0006] Cancer staging describes the extent or severity of an individual's cancer based on characteristics of the original (primary) tumor and the extent, if any, of cancer spread in the body. Clinical trials have compared patients of similar stages to predict the probability of cancer recurrence after surgical removal and to choose appropriate clinical management and surveillance.

[0007] In the United States, the American Joint Committee on Cancer (AJCC) provides criteria for staging based on the TNM staging system (Greene, 2002). The TNM system was developed by the International Union Against Cancer (UICC) and the American Joint Committee on Cancer (AJCC) and attempts to provide a uniform stratification of patients that allows for the comparison of patients in clinical studies and for determining optimal treatment and survival rates. Common elements considered in the TNM and in most other staging systems include location of the primary tumor, tumor size and number of tumors (T), lymph node involvement (spread of cancer into lymph nodes) (N), cell type and tumor grade (how closely the cancer cells resemble normal tissue), and presence or absence of cancer metastasis (M). TNM criteria are different for each anatomic cancer site. Cancer staging criteria are modified and updated over time, as scientists learn more about individual cancer types and identify which aspects of the system represent accurate predictors for disease recurrence and patient survival.

[0008] For many cancers, lymph node involvement, or metastasis to lymph nodes, has become recognized as a strong predictor of disease recurrence and patient survival. Metastatic deposits visible to the naked eye (>2 mm) are used to denote whether a lymph node is positive (Greene, 2002). Currently, metastatic cancer deposits <2 mm in size that are found in a lymph node are referred to as micrometastatic lesions or micrometastatic disease (MMD). However, under current staging systems, lymph nodes with MMD remain classified as negative (N0) for cancer metastasis. MMD is currently only recognized in the staging of breast cancer, due to extenisve evaluations of the prognostic significance of sentinel lymph nodes from breast cancer patients.

[0009] In general, current methods for assessing lymph node involvement, especially those for evaluating the presence of MMD, have significant limitations. Classifying a tumor as metastatic is a coordinated effort among a pathologist, a radiologist, a surgeon, and an oncologist. Microscopic examination of lymph nodes, typically performed by a pathologist, is essential for proper cancer staging. Only a very small fraction of a lymph node (approximately 0.1-0.2%), is evaluated microscopically for metastatic cancer cells by a pathologist. Immunohistochemical (IHC) staining can increase the sensitivity by subjecting an additional small fraction of the lymph node to a more specific assay. Likewise, tissue sectioning at additional levels of the lymph node can increase the percentage of the lymph node that is examined, but this procedure is used infrequently and most commonly for sentinel lymph node evaluation. Furthermore, protocols for lymph node evaluation are not standardized among pathologists, and no current protocol allows for microscopic examination of more than 10% of a lymph node (Coello et al, 2004; Hughes et al., 2006; Ferris et al., 2005; Xi et al., 2005; Xi et al., 2006; Takeuchi et al., 2004; Scoggins et al., 2006; D'Cunha et al., 2005; Gillanders et al., 2004; Schurr et al., 2006; Houvenaeghel et al., 2006; Kammula et al., 2004). In addition, at least one group has reported alarming discordance in histologic interpretations by different pathologists (Roberts et al., 2003). As a result of these limitations, 25% to 35% of cancer patients, who are lymph node-negative by the present state of the art examination, will experience a recurrence of their cancer. It is believed that a major contributing factor to missed metastases is the presence in the lymph node of occult metastasis (i.e., not readily apparent or hidden) and/or MMD that is not detected by the present state of the art examination. The current invention overcomes these problems in the art by describing quantitative molecular methods and novel molecular markers (microRNAs) (Lagos-Quintana et al., 2001; Lau et al., 2001; Lee and Ambros, 2001) for detection of metastatic cancer in lymph nodes.

[0010] microRNAs (miRNAs) are short RNA molecules (17-24 nucleotides in length) that arise from longer precursors, which are transcribed from non-protein-encoding genes. See review of Carrington et al (2003). The precursors are processed by cellular proteins to generate the short double-stranded miRNA. One of the miRNA strands is incorporated into a complex of proteins and miRNA called the RNA-induced silencing complex (RISC). The miRNA guides the RISC complex to a target mRNA, which is then cleaved or translationally silenced, depending on the degree of sequence complementarity of the miRNA to its target mRNA (Bagga et al, 2005; Lim et al., 2005). Recent studies have shown that expression levels of numerous miRNAs are associated specifically with various cancers (reviewed in Esquela-Kerscher and Slack, 2006; Calin and Croce, 2006). miRNAs have also been implicated in regulating cell growth, cell proliferation, and cell and tissue differentiation—cellular processes that are associated with the development of cancer. The present invention advances the current art for cancer staging by describing the use of novel miRNA markers and combinations of miRNA markers for the detection of specific cancer metastases to lymph nodes.

### SUMMARY OF THE INVENTION

[0011] Embodiments of the present invention provides additional prognostic and/or diagnostics methods by identifying miRNAs that are differentially expressed or mis-regulated in various states of diseased, normal, cancerous, and/or abnormal tissues, including but not limited to lymph node (LN), cervix, skin, colon, breast, bladder, esophagus, liver, ovary, prostate, lung, pancreas, thyroid, kidney, stomach, testicle, uterus, spleen, tongue, brain, thymus, trachea and/or small intestine. As referred to herein, a tissue is a biological tissue. Biological tissue is typically defined as a collection of interconnected cells that perform a similar function within an organism or collectively form an organ. One of skill in the art can readily determine what part of the body or organ a particular tissue designation refers to. In certain apsects, differential miRNA expression is initially determined by comparing miRNA expression between a normal tissue and cancer negative lymph node (LNneg), a normal tissue and a cancer positive lymph node (LNpos), a cancerous tissue and LNneg and/or LNpos, LNneg and LNpos. In further aspects, the methods of the invention is used to identify the presence or absence of ectopic cells from other organs or tissues, and/or metastatic cancer cells present in lymph nodes (LN), which are detectable by the described methods. Lymph nodes are components of the lymphatic system. They are nodes that typically contain white blood cells and are found throughout the body functioning as filters or traps for foreign particles. Further, the invention describes a method for diagnosing diseased, normal, cancerous, abnormal tissues and/or dissemination of cancer cells based on determining levels (increased or decreased) of selected miRNAs in patient-derived samples, particularly lymph nodes (e.g., sentinel, proximal, and/or distal LN). Samples obtained and/or analyzed from patients, including but not limited to patients that have had, have or are suspected of having a cancer of the cervix, skin, colon, breast, bladder, esophagus, liver, ovary, prostate, lung, pancreas, thyroid, kidney, stomach, testicle, uterus, spleen, tongue, brain, thymus, trachea and/or small intestine or other hyperproliferative or cancerous condition.

[0012] In some embodiments, it may be useful to know whether a cell expresses a particular miRNA or set of miRNAs endogenously or whether such expression is affected under particular conditions or when it is in a particular disease state. Thus, in some embodiments of the invention, methods include assaying one or more cell or sample containing a cell for the presence of one or more miRNA. Consequently, in some embodiments, methods include a step of generating a miRNA profile for one or more samples. The term “miRNA profile” refers to a set of data regarding the expression pattern for a plurality of miRNAs in a sample(s); it is contemplated that the miRNA profile can be obtained, using for example, nucleic acid amplification or hybridization techniques well known to one of ordinary skill in the art.

[0013] In some embodiments of the invention, a miRNA profile is generated by steps that include: (a) labeling miRNA in the sample; (b) hybridizing miRNA to a number of probes, or amplifying a number of miRNA, and (c) determining miRNA hybridization to the probes or detecting miRNA amplification products, wherein a miRNA profile is generated. See U.S. Provisional Patent Application 60/575,743 and the U.S. Provisional Patent Application 60/649,584, and U.S. patent application Ser. No. 11/141,707, all of which are hereby incorporated by reference.

[0014] Methods of the invention involve prognosing and/or diagnosing a patient based on a miRNA expression profile in lymph node(s). In certain embodiments, the elevation or reduction in the level of expression of a particular miRNA or set of miRNA in a sample is correlated with a disease or normal state compared to the expression level of that miRNA or set of miRNA in a normal tissue reference or a diseased tissue reference. This correlation allows for the identification of non-lymphoid cells in lymph nodes and enhances or provides prognostic and/or diagnostic methods. It is specifically contemplated that miRNA profiles for patients having or suspected of having a particular disease or condition such as cervix, skin, colon, breast, bladder, esophagus, liver, ovary, prostate, lung, pancreas, thyroid, kidney, stomach, testicle, uterus, spleen, tongue, brain, thymus, trachea and/or small intestine cancer can be generated by evaluating any of the sets or subsets of the miRNAs discussed in this application. The miRNA profile that is generated from the patient will be one that provides prognostic, diagnostic or staging information regarding the particular disease or condition. In many embodiments, the miRNA profile is generated using miRNA hybridization or amplification, (e.g., array hybridization or RT-PCR). In certain aspects, a miRNA profile can be used in conjunction with other diagnostic tests, such as protein levels or mRNA expression levels.

[0015] A miRNA or probe set comprising or identifying a segment of a corresponding miRNA can include all or part of 1, 2, 3, 4, 5, 6, 7, 8, 9, 10, 11, 12, 13, 14, 15, 16, 17, 18, 19, 20, 21, 22, 23, 24, 25, 26, 27, 28, 29, 30, 35, 40, 45, 50, 55, 60, 65, 70, 75, 80, 85, 90, 95, 100, 125, 150, 175, 200, 250, 300, 350, 400, 500 600, 700, 800, 900, 1,000 miRNAs, including any integer or range derivable there between, of Table 4, 5, 6, 10, 11, 12, 13, 14, 16, 17, 18, 19, 20, 21, 22, 23, 24, 25, 25, 27, 28, 29, 30, 31, 32, 33, 34, 35, 36, 37, 39, 40, 41, 43, and/or 44.

[0016] A sample may be taken from a patient having or suspected of having a disease or pathological condition. In certain aspects, the sample can be, but is not limited to tissue (e.g., biopsy, particularly fine needle biopsy), blood, serum, plasma, fluids (sputum, secretions, etc.) or lymph nodes (such as sentinel, proximal to a disease site, or distal from a disease site). The sample can be fresh, frozen, fixed (e.g., formalin fixed), or embedded (e.g., paraffin embedded). In a particular aspect, the sample can be a biopsy sample, or a lymph node sample.

[0017] In certain aspects of the invention a plurality of miRNAs have been identified that can be used to evaluate LN for the presence of a number of different non-lymphoid tissue or cell types. This pandiagnostic or panprognostic set of miRNAs include miRNA that are typically differentially expressed between normal tissues and normal lymph node. These miRNA include one or more miRNA selected from Table 37.

[0018] It is contemplated that various subsets of the miRNA listed herein can be used to the exclusion of other subsets of miRNA described herein.

[0019] miRNAs differentially expressed between cervix and LNneg tissue include one or more of miRNA selected from Table 4.

[0020] miRNAs differentially expressed between LNpos and LNneg tissue in cervical cancer patients include one or more miRNA selected from Table 5.

[0021] miRNAs differentially expressed in both cervix versus LNneg and LNpos versus LNneg include one or more miRNA selected from Table 6.

[0022] miRNAs differentially expressed between melanoma and LNneg tissue include one or more miRNA selected from Table 10.

[0023] miRNAs differentially expressed between LNpos and LNneg tissue from melanoma patients include one or more miRNA selected from Table 11 and/or 12.

[0024] miRNAs differentially expressed between normal colon and LNneg include one or more miRNA selected from Table 16 and/or 17.

[0025] miRNAs differentially expressed between normal breast and LNneg include one or more miRNA selected from Table 18.

[0026] miRNAs differentially expressed between normal bladder and LNneg include one or more miRNA selected from Table 19.

[0027] miRNAs differentially expressed between normal esophagus and LNneg include one or more miRNA selected from Table 20.

[0028] miRNAs differentially expressed between normal liver and LNneg include one or more miRNA selected from Table 21.

[0029] miRNAs differentially expressed between normal ovary and LNneg include one or more miRNA selected from Table 22.

[0030] miRNAs differentially expressed between normal prostate and LNneg include one or more miRNA selected from Table 23.

[0031] miRNAs differentially expressed between normal lung and LNneg include one or more miRNA selected from Table 24.

[0032] miRNAs differentially expressed between normal pancreas and LNneg include one or more miRNA selected from Table 25.

[0033] miRNAs differentially expressed between normal thyroid and LNneg include one or more miRNA selected from Table 26.

[0034] miRNAs differentially expressed between normal kidney and LNneg include one or more miRNA selected from Table 27.

[0035] miRNAs differentially expressed between normal stomach and LNneg include one or more miRNA selected from Table 28.

[0036] miRNAs differentially expressed between normal testicle and LNneg include one or more miRNA selected from Table 29.

[0037] miRNAs differentially expressed between normal uterus and LNneg include one or more miRNA selected from Table 30.

[0038] miRNAs differentially expressed between normal spleen and LNneg include one or more miRNA selected from Table 31.

[0039] miRNAs differentially expressed between normal tongue and LNneg include one or more miRNA selected from Table 32.

[0040] miRNAs differentially expressed between normal brain and LNneg include one or more miRNA selected from Table 33.

[0041] miRNAs differentially expressed between normal thymus and LNneg include one or more miRNA selected from Table 34.

[0042] miRNAs differentially expressed between normal trachea and LNneg include one or more miRNA selected from Table 35.

[0043] miRNAs differentially expressed between normal small intestine and LNneg include one or more miRNA selected from Table 36.

[0044] miRNAs differentially expressed between cancer-positive LN and/or cancer-negative LN from breast cancer patients include one or more miRNA selected from Table 39.

[0045] miRNAs differentially expressed between normal breast and LNneg include one or more miRNA selected from Table 40.

[0046] miRNAs differentially expressed between normal breast tissue and cancer-negative axillary LN, and between LNneg and LNpos axillary LN include one or more miRNA selected from Table 41.

[0047] miRNAs differentially expressed between LNneg and LNpos from breast cancer patients include one or more miRNA selected from Table 43.

[0048] miRNAs differentially expressed between LNpos and LNneg from cervical cancer patients include one or more miRNA selected from Table 44.

[0049] miRNA sequences can be found in the miRBase database (release 12.0 (September 2008)). miRBase is accessible via the world wide web at microma.sanger.ac.uk, the content of release 12.0, as it relates to the miRNA identified in the tables, is incorporated herein by reference in its entirety.

[0050] The methods can further comprise one or more of steps including: (a) obtaining a sample from the patient, (b) isolating nucleic acids from the sample, (c) labeling the nucleic acids isolated from the sample, (d) hybridizing the labeled nucleic acids to one or more probes, and/or evaluating or assessing the level of expression of miRNA of interest. Once evaluation or assessment has been completed then a prognosis, diagnosis, stage of disease or other report can be generated and transmitted to a person of interest, e.g., a physician.

[0051] Certain embodiments of the invention include determining expression of one or more miRNA by using an amplification assay or a hybridization assay, a variety of which are well known to one of ordinary skill in the art. In certain aspects, an amplification assay can be a quantitative amplification assay, such as quantitative RT-PCR or the like. In still further aspects, a hybridization assay can include array hybridization assays or solution hybridization assays.

[0052] Aspects of the invention can be used to diagnose or assess a patient's condition. For example, the methods can be used to screen for a pathological condition, assess prognosis of a pathological condition, stage a pathological condition, or assess response of a pathological condition to therapy.

[0053] The present invention also concerns kits containing compositions of the invention or compositions to implement methods of the invention. In some embodiments, kits can be used to evaluate one or more miRNA molecules. In certain embodiments, a kit contains, contains at least or contains at most 1, 2, 3, 4, 5, 6, 7, 8, 9, 10, 11, 12, 13, 14, 15, 16, 17, 18, 19, 20, 21, 22, 23, 24, 25, 26, 27, 28, 29, 30, 31, 32, 33, 34, 35, 36, 37, 38, 39, 40, 41, 42, 43, 44, 45, 46, 47, 48, 49, 50, 100, 500, 1,000 or more miRNA probes, synthetic miRNA molecules or miRNA inhibitors, or any value or range and combination derivable therein. In some embodiments, there are kits for evaluating miRNA activity in a cell.

[0054] Kits may comprise components, which may be individually packaged or placed in a container, such as a tube, bottle, vial, syringe, or other suitable container means.

[0055] Individual components may also be provided in a kit in concentrated amounts; in some embodiments, a component is provided individually in the same concentration as it would be in a solution with other components. Concentrations of components may be provided as 1×, 2×, 5×, 10×, or 20× or more.

[0056] Kits for using miRNA probes, synthetic miRNAs, nonsynthetic miRNAs, and/or miRNA inhibitors of the invention for prognostic or diagnostic applications are included as part of the invention. Specifically contemplated are any such molecules corresponding to any miRNA identified herein.

[0057] In certain aspects, negative and/or positive control synthetic miRNAs and/or miRNA inhibitors are included in some kit embodiments. The control molecules can be used to verify transfection efficiency and/or control for transfection-induced changes in cells.

[0058] It is contemplated that any method or composition described herein can be implemented with respect to any other method or composition described herein and that different embodiments may be combined. It is specifically contemplated that any methods and compositions discussed herein with respect to miRNA molecules or miRNA may be implemented with respect to synthetic miRNAs to the extent the synthetic miRNA is exposed to the proper conditions to allow it to become a mature miRNA under physiological circumstances. The claims originally filed are contemplated to cover claims that are multiply dependent on any filed claim or combination of filed claims.

[0059] Any embodiment of the invention involving specific miRNAs by name is contemplated also to cover embodiments involving miRNAs whose sequences are at least 80, 81, 82, 83, 84, 85, 86, 87, 88, 89, 90, 91, 92, 93, 94, 95, 96, 97, 98, 99% identical to the mature sequence of the specified miRNA.

[0060] Embodiments of the invention include kits for analysis of a pathological sample by assessing miRNA profile for a sample comprising, in suitable container means, two or more miRNA probes, wherein the miRNA probes detect one or more of the miRNA identified herein. The kit can further comprise reagents for labeling miRNA in the sample. The kit may also include labeling reagents, including at least one of amine-modified nucleotide, poly(A) polymerase, and poly(A) polymerase buffer. Labeling reagents can include an amine-reactive dye.

[0061] Other embodiments of the invention are discussed throughout this application. Any embodiment discussed with respect to one aspect of the invention applies to other aspects of the invention as well and vice versa. The embodiments in the Example section are understood to be embodiments of the invention that are applicable to all aspects of the invention.

[0062] The terms “inhibiting,” “reducing,” or “prevention,” or any variation of these terms, when used in the claims and/or the specification includes any measurable decrease or complete inhibition to achieve a desired result.

[0063] The use of the word “a” or “an” when used in conjunction with the term “comprising” in the claims and/or the specification may mean “one,” but it is also consistent with the meaning of “one or more,” “at least one,” and “one or more than one.”

[0064] It is contemplated that any embodiment discussed herein can be implemented with respect to any method or composition of the invention, and vice versa. Furthermore, compositions and kits of the invention can be used to achieve methods of the invention.

[0065] Throughout this application, the term “about” is used to indicate that a value includes the standard deviation of error for the device or method being employed to determine the value.

[0066] The use of the term “or” in the claims is used to mean “and/or” unless explicitly indicated to refer to alternatives only or the alternatives are mutually exclusive, although the disclosure supports a definition that refers to only alternatives and “and/or.”

[0067] As used in this specification and claim(s), the words “comprising” (and any form of comprising, such as “comprise” and “comprises”), “having” (and any form of having, such as “have” and “has”), “including” (and any form of including, such as “includes” and “include”) or “containing” (and any form of containing, such as “contains” and “contain”) are inclusive or open-ended and do not exclude additional, unrecited elements or method steps.

[0068] Other objects, features and advantages of the present invention will become apparent from the following detailed description. It should be understood, however, that the detailed description and the specific examples, while indicating specific embodiments of the invention, are given by way of illustration only, since various changes and modifications within the spirit and scope of the invention will become apparent to those skilled in the art from this detailed description.

### DESCRIPTION OF THE DRAWINGS

[0069] The following drawings form part of the present specification and are included to further demonstrate certain aspects of the present invention. The invention may be better understood by reference to one or more of these drawings in combination with the detailed description of specific embodiments presented herein.

[0070] FIGS. 1A-1B Differences in expression levels of eleven miRNAs, between LNpos1-4 and LNneg1-4 samples from cervical cancer patients, measured by qRT-PCR and microarray quantification. The graphs show the individual normalized expression levels determined by array or qRT-PCR and associated p-values (pair-wise t-test).

[0071] FIGS. 2A-2D qRT-PCR quantification of eleven microRNAs in two independent sets of cancer-positive (LNpos) and cancer-negative (LNneg) lymph nodes obtained from cervical cancer patients. (FIG. 2A) Samples LNpos1-4 and LNneg1-4. FIG. 2B. Samples LNpos5-12 and LNneg5-8. (FIG. 2C) Combined qRT-PCR data for samples LNpos1-12 and LNneg1-8. (FIG. 2D) Summary table of the qRT-PCR data with fold changes and p-values for LNpos1-4/LNneg1-4, LNpos5-12/LNneg5-8, and LNpos1-12 and LNneg1-8.

[0072] FIG. 3 Differences in expression levels of various miRNA combinations, between LNpos1-4 and LNneg1-4 samples from cervical cancer patients, measured by qRT-PCR and microarray quantification. For qRT-PCR assays, the difference in Ct between the combined normalized Ct values in each sample group is indicated on each graph. For array quantification assays, the difference in the combined ΔH values for each sample group is indicated on each graph.

[0073] FIG. 4 Sensitivity of detection of synthetic miR-205 and miR-203 in a background of total RNA purified from a cervical cancer-negative inguinal lymph node (LNneg). The number of copies of each individual synthetic miRNA added to a background of LNneg total RNA are indicated on the X axis. Mean Ct values indicated on the Y axis represent the mean of duplicated qRT-PCR reactions. Error bars in the figures represent the values for each of the two reactions. Both miR-16 and miR-24 were used as internal controls.

[0074] FIGS. 5A-5B (FIG. 5A) Sensitivity of detection of five miRNAs (miR-205, -429, -200a, -200c, and -141) determined by qRT-PCR, following dilution of total RNA from a cervical tumor (TUM) into total RNA from a cancer-negative inguinal lymph node (LNneg). Arrows indicate limits of detection. Mean Ct, mean of duplicate qRT-PCR reactions. NTC, no template control (i.e., no cervical tumor RNA added). (FIG. 5B) Sensitivity of detection of five miRNAs (miR-205, -429, -200a, -200c, and -141) determined by qRT-PCR, following dilution of total RNA from a cancer-positive lymph node (LNpos) into total RNA from a cancer-negative lymph node (LNneg). Arrows indicate limits of detection. Mean Ct, mean of duplicate qRT-PCR reactions. NTC, no template control (i.e., no LNpos RNA added).

[0075] FIG. 6 Principal component analysis (PCA) of miRNAs differentially expressed in melanoma, cancer-positive lymph node group A (LNposA-LNpos1A), cancer-positive lymph node group B (LNposB-LNpos2B, LNpos3B), and cancer-negative lymph node (LNneg1-7) samples from melanoma patients, as determined by ANOVA.

[0076] FIGS. 7A-7C Comparison of array and qRT-PCR data for selected miRNAs differentially expressed between melanoma (MEL1, MEL3) and cancer-negative lymph nodes (LNneg1-7). (FIG. 7A) Normalized array data for indicated miRNAs. (FIG. 7B) qRT-PCR data obtained with primer sets for the indicated miRNAs, normalized to miR-16 expression level for each samples (miRNACt-miR-16Ct). (FIG. 7C) Associated p-values and fold change for each miRNA as determined by microarray expression analysis or qRT-PCR.

[0077] FIGS. 8A-8C Comparison of array and qRT-PCR data for selected miRNAs differentially expressed between the cancer-positive group A (LNpos1A) lymph node and cancer-negative lymph nodes (LNneg) from melanoma patients. (FIG. 8A) Normalized array data for indicated miRNAs. (FIG. 8B) qRT-PCR data obtained with primer sets for the indicated miRNAs, normalized to miR-16 expression level for each samples (miRNACt-miR-16Ct). (FIG. 8C) Associated p-values and fold change for each miRNA as determined by microarray expression analysis or qRT-PCR.

[0078] FIGS. 9A-9C Comparison of array and qRT-PCR data for selected miRNAs differentially expressed between the cancer-positive group B (LNpos2B, 3B) lymph nodes and cancer-negative lymph nodes (LNneg1-7) from melanoma patients. (FIG. 9A) Normalized array data for indicated miRNAs. (FIG. 9B) qRT-PCR data obtained with primer sets for the indicated miRNAs, normalized to miR-16 expression level for each sample (miRNACt-miR-16Ct). (FIG. 9C) Associated p-values and fold change for each miRNA as determined by microarray expression analysis or qRT-PCR.

[0079] FIG. 10 Differences in expression levels of ten miRNAs, between cancer-positive lymph nodes from colon cancer patients (LNpos) and cancer-negative lymph nodes (LNneg), measured by qRT-PCR The graph shows the individual normalized expression levels (dCt=miRNACt−miR-16Ct). Differences in the normalized mean expression values between the two sample sets were transformed to a general fold change (FC) by exponentiation base 2, as indicated below the graph with the associated p-values (pair-wise t-test).

[0080] FIG. 11 Differences in expression levels of various miRNA combinations, between cancer-positive (LNpos) lymph nodes from colon cancer patients and cancer-negative lymph nodes (LNneg), measured by qRT-PCR. The difference in Ct between the combined mean normalized Ct values in each sample group and the associated p-value are indicated on each graph. miR-16 was used as the normalizer.

[0081] FIGS. 12A-12B Six miRNAs (miR-429, -141, -203, -200a, -200b, and -200c) can distinguish positive and negative lymph nodes from patients with either cervical colon or breast cancer. The graphs show (FIG. 12A) the individual normalized expression levels determined by qRT-PCR for the indicated miRNAs for each positive and negative lymph node analyzed in each cancer group. (FIG. 12B) Differences in expression levels of two combination sets of miRNAs between positive and negative lymph nodes from patients with cervical cancer, colon cancer and breast cancer, measured by qRT-PCR quantification. The miRNAs used in combinations are indicated above the graphs. The difference in Ct between the combined normalized Ct values in each sample group is indicated on each graph.

[0082] FIGS. 13A-13B Comparison of array and qRT-PCR data for selected miRNAs differentially expressed between normal breast (NBr) tissue and cancer-positive (LNpos) and cancer-negative (LNneg) axillary lymph nodes from ductal breast cancer patients. (FIG. 13A) Normalized array data for indicated miRNAs. (FIG. 13B) qRT-PCR data obtained using specific primer sets for each indicated miRNA, normalized to miR-16 expression level (miRNACt-miR-16Ct). Associated p-values (pair-wise-t-test) indicated on top of each graph represents the p-values for NBr and LNneg comparison (p) and the p-values for the comparison of the paired LNpos and LNneg samples (p*).

[0083] FIGS. 14A-14B Differences in mean expression levels of ten miRNAs, between cancer-positive (LNpos) and cancer-negative (LNneg) lymph nodes from breast cancer patients. Data for two independent sets of lymph nodes, represented by FIG. 14A (LNpos2-4 and LNneg1-4) and FIG. 14B (LNpos5-14 and LNneg5-9). Graphs show the mean expression levels of each miRNA after normalization to both miR-16 and miR-638 (dCt=CtmiRNA−1/2(CtmiR16+CtmiR-638)). Ct values indicated on the y-axis represent the mean of duplicate qRT-PCR reactions. Error bars represent the values for each of the two reactions. Differences in the normalized mean expression values between the LNpos and LNneg of each sample set were transformed to a general fold change (FC) by exponentiation base 2 as indicated below each graph. Associated p-values (pair-wise t-test) of the comparison between the paired LNpos and LNneg samples (FIG. 14A-p*) and between the independent and unmatched set of LNpos and LNneg samples (FIG. 14B-p) are indicated below each graph.

[0084] FIG. 15 Combined qRT-PCR data of ten miRNAs for two independent sets of cancer-positive (LNpos2-14) and cancer-negative (LNneg1-9) lymph nodes from breast cancer patients. For each qRT-PCR assay, the difference in Ct between the combined normalized Ct values in each sample group was transformed to a general average fold change (Av.FC) by exponentiation base 2, as indicated on each graph, with associated p-values.

[0085] FIG. 16 Differences in expression levels of various miRNA combinations, between LNpos2-14 and LNneg1-9) samples from breast cancer patients, as measured by qRT-PCR. The difference in Ct between the combined normalized Ct values in each sample group is indicated on the three first graphs. For the two last combinations, miR-429-miR-150 and miR-200a-miR-150, the difference in Ct between the two sample groups is expressed by the subtraction of the raw Ct values of each miRNA.

[0086] FIGS. 17A-17B qRT-PCR quantification of 14 selected miRNAs in FFPE melanoma samples (MEL4-6) and FFPE cancer-positive lymph nodes (LNpos5-8) from melanoma patients compared to cancer-negative lymph nodes (LNneg1-7). (FIG. 17A) Comparison between MEL4-6 and LNneg1-7, as indicated on the graph. (FIG. 17B) Comparison between LNpos5-8 and LNneg1-7 samples, as indicated on the graph. Values represent the mean Ct of duplicated qRT-PCR reactions. miR-16 was used as a normalizer. Error bars in the figures represent the values for each of the two qRT-PCR reactions. For each miRNA, the associated fold change and p-value (student t-test) are indicated below each graph.

[0087] FIGS. 18A-18B Differences in expression levels of fourteen miRNAs between cancer-positive (LNpos) and cancer-negative (LNneg) lymph nodes from melanoma patients. (FIG. 18A) The graph shows the qRT-PCR data obtained with primer sets specific for the indicated miRNAs, normalized to miR-16 expression level (miRNACt-miR-16Ct) in LNneg1-7, LNposA (LNpos1A), LNposB (LNpos2-7), and LNpos8, as indicated on the graph. (FIG. 18B) Summary table of the data with fold-changes and associated p-values for LNposA vs LNneg and LNposB vs LNneg.

[0088] FIGS. 19A-19B Differences in expression levels of various miRNA combinations, between melanomas (MEL), cancer-negative (LNneg) lymph nodes, and cancer-positive (LNpos) lymph nodes. The miRNAs used in combinations are indicated above the graphs. (FIG. 19A) The graphs show the combined mean Ct values in each of LNneg, LNpos, and MEL samples, normalized to miR-16. (FIG. 19B) The table displays the fold changes observed between the mean Ct values of each sample group.

### DETAILED DESCRIPTION OF THE INVENTION

[0089] Embodiments of the present invention are directed to compositions and methods relating to preparation and characterization of miRNAs, as well as to the use of miRNAs for therapeutic, prognostic, diagnostic, and staging applications, particularly those methods and compositions related to assessing and/or identifying a non-lymphoid cell in a lymph node tissue.

### I. miRNA Molecules

[0090] The term “miRNA” is used according to its ordinary and plain meaning and refers to a microRNA molecule found in eukaryotes that is involved in RNA-based gene regulation. See, e.g., Carrington et al., 2003, which is hereby incorporated by reference. The term will be used to refer to the single-stranded RNA molecule processed from a precursor. Individual miRNAs have been identified and sequenced in different organisms, and they have been given names. Names of miRNAs related to the present invention are provided herein. The sequences related to these miRNA are know and available through public resources such as scientfic publications, miRBase 12.0 and other nucleic acid databases. The methods and compositions should not be limited to miRNAs identified in the application, as they are provided as examples, not necessarily as limitations of the invention.

[0091] MicroRNA molecules (“miRNAs”) are generally 21 to 22 nucleotides in length, though lengths of 16 and up to 35 nucleotides have been reported. The miRNAs are each processed from a longer precursor RNA molecule (“precursor miRNA”). Precursor miRNAs are transcribed from non-protein-encoding genes. The precursor miRNAs have two regions of complementarity that enables them to form a stem-loop- or fold-back-like structure, which is cleaved in animals by a ribonuclease III-like nuclease enzyme called Dicer. The processed miRNA is typically a portion of the stem.

[0092] The processed miRNA (also referred to as “mature miRNA”) become part of a large complex to down-regulate a particular target gene. Examples of animal miRNAs include those that imperfectly basepair with the target, which halts translation (Olsen et al., 1999; Seggerson et al., 2002). siRNA molecules also are processed by Dicer, but from a long, double-stranded RNA molecule. siRNAs are not naturally found in animal cells, but they can direct the sequence-specific cleavage of an mRNA target through a RNA-induced silencing complex (RISC) (Denli et al, 2003).

[0093] A. Nucleic Acids

[0094] The present invention concerns miRNAs that can be labeled, used in array analysis, or employed in diagnostic, therapeutic, prognostic, and/or staging applications, particularly those related to pathological and/or cancerous conditions. The RNA may have been endogenously produced by a cell, or been synthesized or produced chemically or recombinantly. They may be isolated and/or purified. The term “miRNA,” unless otherwise indicated, refers to the processed RNA, after it has been cleaved from its precursor. Mature and precursor sequences of miRNA can typically be located in Sanger miRBase™ accessible on the internet at microrna.sanger.ac.uk/ or in various scientific publications. The name of the miRNA is often abbreviated and referred to without a hsa-, mmu-, or rno-prefix and will be understood as such, depending on the context. Unless otherwise indicated, miRNAs referred to in the application are human sequences identified as miR-X or let-X, where X is a number and/or letter.

[0095] It is understood that a “synthetic nucleic acid” of the invention means that the nucleic acid does not have a chemical structure or sequence of a naturally occurring nucleic acid. Consequently, it will be understood that the term “synthetic miRNA” refers to a “synthetic nucleic acid” that functions in a cell or under physiological conditions as a naturally occurring miRNA.

[0096] While many of the embodiments of the invention involve synthetic miRNAs or synthetic nucleic acids, in some embodiments of the invention, the nucleic acid molecule(s) need not be “synthetic.” The term miRNA will generically refer to both non-synthetic (e.g., endogenous) miRNA and synthetic miRNA. In certain embodiments, a non-synthetic miRNA employed in methods and compositions of the invention may have the entire sequence and structure of a naturally occurring miRNA precursor or the mature miRNA. For example, non-synthetic miRNAs used in methods and compositions of the invention may not have one or more modified nucleotides or nucleotide analogs. In these embodiments, the non-synthetic miRNA may or may not be recombinantly produced. Any embodiments discussed with respect to the use of synthetic miRNAs can be applied with respect to non-synthetic miRNAs, and vice versa.

[0097] It will be understood that the term “naturally occurring” refers to something found in an organism without any intervention by a person; it could refer to a naturally-occurring wildtype or mutant molecule. In some embodiments a synthetic miRNA molecule does not have the sequence of a naturally occurring miRNA molecule. In other embodiments, a synthetic miRNA molecule may have the sequence of a naturally occurring miRNA molecule, but the chemical structure of the molecule, particularly in the part unrelated specifically to the precise sequence (non-sequence chemical structure) differs from chemical structure of the naturally occurring miRNA molecule with that sequence. In some cases, the synthetic miRNA has both a sequence and non-sequence chemical structure that are not found in a naturally-occurring miRNA. Moreover, the sequence of the synthetic molecules will identify which miRNA is effectively being provided or inhibited; the endogenous miRNA will be referred to as the “corresponding miRNA.” Corresponding miRNA sequences that can be used in the context of the invention include, but are not limited to, all or a portion of those sequences referred to herein, as well as any other miRNA sequence, miRNA precursor sequence, or any sequence complementary thereof. In some embodiments, the sequence is or is derived from or contains all or part of a sequence identified herein to target or identify or measure a particular miRNA (or set of miRNAs).

[0098] In certain experiments, a miRNA probe designated by a suffix “5P” or “3P” can be used. “5P” indicates that the mature miRNA derives from the 5′ end of the precursor and a corresponding “3P” indicates that it derives from the 3′ end of the precursor, as described on the miRBase™ website. Moreover, in some embodiments, a miRNA probe is used that does not correspond to a known human miRNA. It is contemplated that these non-human miRNA probes may be used in embodiments of the invention or that there may exist a human miRNA that is homologous to the non-human miRNA. While the invention is not limited to human miRNA, in certain embodiments, miRNA from human cells or a human biological sample is evaluated. In other embodiments, any mammalian cell, biological sample, or preparation thereof may be employed.

[0099] In some embodiments of the invention, methods and compositions involving miRNA may concern miRNA and/or other nucleic acids. Nucleic acids may be, be at least, or be at most 3, 4, 5, 6, 7, 8, 9, 10, 11, 12, 13, 14, 15, 16, 17, 18, 19, 20, 21, 22, 23, 24, 25, 26, 27, 28, 29, 30, 31, 32, 33, 34, 35, 36, 37, 38, 39, 40, 41, 42, 43, 44, 45, 46, 47, 48, 49, 50, 51, 52, 53, 54, 55, 56, 57, 58, 59, 60, 61, 62, 63, 64, 65, 66, 67, 68, 69, 70, 71, 72, 73, 74, 75, 76, 77, 78, 79, 80, 81, 82, 83, 84, 85, 86, 87, 88, 89, 90, 91, 92, 93, 94, 95, 96, 97, 98, 99, 100, 101, 102, 103, 104, 105, 106, 107, 108, 109, 110, 120, 130, 140, 150, 160, 170, 180, 190, 200, 210, 220, 230, 240, 250, 260, 270, 280, 290, 300, 310, 320, 330, 340, 350, 360, 370, 380, 390, 400, 410, 420, 430, 440, 450, 460, 470, 480, 490, 500, 510, 520, 530, 540, 550, 560, 570, 580, 590, 600, 610, 620, 630, 640, 650, 660, 670, 680, 690, 700, 710, 720, 730, 740, 750, 760, 770, 780, 790, 800, 810, 820, 830, 840, 850, 860, 870, 880, 890, 900, 910, 920, 930, 940, 950, 960, 970, 980, 990, 1000, or 10,000 nucleotides or more in length, including any range derivable therein, in length. Such lengths cover the lengths of processed miRNA, miRNA probes, precursor miRNA, miRNA containing vectors, control nucleic acids, and other probes and primers. In many embodiments, miRNA are 19-24 nucleotides in length, while miRNA probes are 19-35 nucleotides in length, depending on the length of the processed miRNA and any flanking regions added. miRNA precursors are generally between 62 and 110 nucleotides in humans.

[0100] Nucleic acids of the invention may have regions of identity or complementarity to another nucleic acid. It is contemplated that the region of complementarity or identity can be at least 5 contiguous residues, though it is specifically contemplated that the region is, is at least, or is at most 6, 7, 8, 9, 10, 11, 12, 13, 14, 15, 16, 17, 18, 19, 20, 21, 22, 23, 24, 25, 26, 27, 28, 29, 30, 31, 32, 33, 34, 35, 36, 37, 38, 39, 40, 41, 42, 43, 44, 45, 46, 47, 48, 49, 50, 51, 52, 53, 54, 55, 56, 57, 58, 59, 60, 61, 62, 63, 64, 65, 66, 67, 68, 69, 70, 71, 72, 73, 74, 75, 76, 77, 78, 79, 80, 81, 82, 83, 84, 85, 86, 87, 88, 89, 90, 91, 92, 93, 94, 95, 96, 97, 98, 99, 100, or 110 contiguous nucleotides including ranges there between. It is further understood that the length of complementarity within a precursor miRNA or between a miRNA probe and a miRNA or a miRNA gene are such lengths. Moreover, the complementarity may be expressed as a percentage, meaning that the complementarity or identity between a probe and its target is 90% or greater over the length of the probe. In some embodiments, complementarity is or is at least 90%, 95% or 100%. In particular, such lengths may be applied to any nucleic acid comprising a nucleic acid sequence identified or disclosed herein. The commonly used name of the miRNA is given (with its identifying source in the prefix, for example, “hsa” for human sequences) and the processed miRNA sequence. Unless otherwise indicated, a miRNA without a prefix will be understood to refer to a human miRNA. A miRNA designated, for example, as miR-1-2 in the application will be understood to refer to hsa-miR-1-2. Moreover, a lowercase letter in one reference may or may not be lowercase in another; for example, hsa-mir-130b can also be referred to as miR-130B. Other prefix can be found using the miRBase website or similar databases. The term “miRNA probe” refers to a nucleic acid probe that can identify a particular miRNA or structurally related miRNAs.

[0101] The term “recombinant” may be used and this generally refers to a molecule that has been manipulated in vitro or that is a replicated or expressed product of such a molecule.

[0102] The term “nucleic acid” is well known in the art. A “nucleic acid” as used herein will generally refer to a molecule (one or more strands) of DNA, RNA or a derivative or analog thereof, comprising a nucleobase. A nucleobase includes, for example, a naturally occurring purine or pyrimidine base found in DNA (e.g., an adenine “A,” a guanine “G,” a thymine “T” or a cytosine “C”) or RNA (e.g., an A, a G, an uracil “U” or a C). The term “nucleic acid” encompasses the terms “oligonucleotide” and “polynucleotide,” each as a subgenus of the term “nucleic acid.”

[0103] The term “miRNA” generally refers to a single-stranded molecule, but in specific embodiments, molecules implemented in the invention will also encompass a region or an additional strand that is partially (between 10 and 50% complementary across length of strand), substantially (greater than 50% but less than 100% complementary across length of strand) or fully complementary to another region of the same single-stranded molecule or to another nucleic acid. Thus, nucleic acids may encompass a molecule that comprises one or more complementary or self-complementary strand(s) or “complement(s)” of a particular sequence comprising a molecule. For example, precursor miRNA may have a self-complementary region, which is up to 100% complementary. miRNA probes or nucleic acids of the invention can include, can be or can be at least 60, 65, 70, 75, 80, 85, 90, 95, 96, 97, 98, 99 or 100% complementary to their target.

[0104] As used herein, “hybridization”, “hybridizes” or “capable of hybridizing” is understood to mean the forming of a double or triple stranded molecule or a molecule with partial double or triple stranded nature. The term “anneal” as used herein is synonymous with “hybridize.” The term “hybridization”, “hybridize(s)” or “capable of hybridizing” encompasses the terms “stringent condition(s)” or “high stringency” and the terms “low stringency” or “low stringency condition(s).”

[0105] As used herein “stringent condition(s)” or “high stringency” are those conditions that allow hybridization between or within one or more nucleic acid strand(s) containing complementary sequence(s), but preclude hybridization of random sequences. Stringent conditions tolerate little, if any, mismatch between a nucleic acid and a target strand. Such conditions are well known to those of ordinary skill in the art, and are preferred for applications requiring high selectivity. Non-limiting applications include isolating a nucleic acid, such as a gene or a nucleic acid segment thereof, or detecting at least one specific mRNA transcript or a nucleic acid segment thereof, and the like.

[0106] Stringent conditions may comprise low salt and/or high temperature conditions, such as provided by about 0.02 M to about 0.5 M NaCl at temperatures of about 42° C. to about 70° C. It is understood that the temperature and ionic strength of a desired stringency are determined in part by the length of the particular nucleic acid(s), the length and nucleobase content of the target sequence(s), the charge composition of the nucleic acid(s), and the presence or concentration of formamide, tetramethylammonium chloride or other solvent(s) in a hybridization mixture.

[0107] It is also understood that these ranges, compositions and conditions for hybridization are mentioned by way of non-limiting examples only, and that the desired stringency for a particular hybridization reaction is often determined empirically by comparison to one or more positive or negative controls. Depending on the application envisioned it is preferred to employ varying conditions of hybridization to achieve varying degrees of selectivity of a nucleic acid towards a target sequence. In a non-limiting example, identification or isolation of a related target nucleic acid that does not hybridize to a nucleic acid under stringent conditions may be achieved by hybridization at low temperature and/or high ionic strength. Such conditions are termed “low stringency” or “low stringency conditions,” and non-limiting examples of low stringency include hybridization performed at about 0.15 M to about 0.9 M NaCl at a temperature range of about 20° C. to about 50° C. Of course, it is within the skill of one in the art to further modify the low or high stringency conditions to suite a particular application.

[0108] In some embodiments, there is a synthetic miRNA having a length of between 17 and 130 residues. The present invention concerns synthetic miRNA molecules that are, are at least, or are at most 8, 9, 10, 11, 12, 13, 14, 15, 16, 17, 18, 19, 20, 21, 22, 23, 24, 25, 26, 27, 28, 29, 30, 31, 32, 33, 34, 35, 36, 37, 38, 39, 40, 41, 42, 43, 44, 45, 46, 47, 48, 49, 50, 51, 52, 53, 54, 55, 56, 57, 58, 59, 60, 61, 62, 63, 64, 65, 66, 67, 68, 69, 70, 71, 72, 73, 74, 75, 76, 77, 78, 79, 80, 81, 82, 83, 84, 85, 86, 87, 88, 89, 90, 91, 92, 93, 94, 95, 96, 97, 98, 99, 100, 101, 102, 103, 104, 105, 106, 107, 108, 109, 110, 111, 112, 113, 114, 115, 116, 117, 118, 119, 120, 121, 122, 123, 124, 125, 126, 127, 128, 129, 130, 140, 145, 150, 160, 170, 180, 190, 200 or more residues in length, including any integer or any range derivable therein.

[0109] In certain embodiments, synthetic miRNA have (a) a “miRNA region” whose sequence from 5′ to 3′ is identical to all or a segment of a mature miRNA sequence, and (b) a “complementary region” whose sequence from 5′ to 3′ is between 60% and 100% complementary to the miRNA sequence. In certain embodiments, these synthetic miRNA are also isolated, i.e.,. The term “miRNA region” refers to a region on the synthetic miRNA that is at least 75, 80, 85, 90, 95, or 100% identical, including all integers there between, to the entire sequence of a mature, naturally occurring miRNA sequence. In certain embodiments, the miRNA region is or is at least 90, 91, 92, 93, 94, 95, 96, 97, 98, 99, 99.1, 99.2, 99.3, 99.4, 99.5, 99.6, 99.7, 99.8, 99.9 or 100% identical to the sequence of a naturally-occurring miRNA.

[0110] The term “complementary region” refers to a region of a synthetic miRNA that is or is at least 60% complementary to the mature, naturally occurring miRNA sequence that the miRNA region is identical to. The complementary region is or is at least 60, 61, 62, 63, 64, 65, 66, 67, 68, 69, 70, 71, 72, 73, 74, 75, 76, 77, 78, 79, 80, 81, 82, 83, 84, 85, 86, 87, 88, 89, 90, 91, 92, 93, 94, 95, 96, 97, 98, 99, 99.1, 99.2, 99.3, 99.4, 99.5, 99.6, 99.7, 99.8, 99.9 or 100% complementary, or any range derivable therein. With single polynucleotide sequences, there is a hairpin loop structure as a result of chemical bonding between the miRNA region and the complementary region. In other embodiments, the complementary region is on a different nucleic acid molecule than the miRNA region, in which case the complementary region is on the complementary strand and the miRNA region is on the active strand.

[0111] In other embodiments of the invention, there are synthetic nucleic acids that are miRNA inhibitors. A miRNA inhibitor is between about 17 to 25 nucleotides in length and comprises a 5′ to 3′ sequence that is at least 90% complementary to the 5′ to 3′ sequence of a mature miRNA. In certain embodiments, a miRNA inhibitor molecule is 17, 18, 19, 20, 21, 22, 23, 24, or 25 nucleotides in length, or any range derivable therein. Moreover, a miRNA inhibitor has a sequence (from 5′ to 3′) that is or is at least 90, 91, 92, 93, 94, 95, 96, 97, 98, 99, 99.1, 99.2, 99.3, 99.4, 99.5, 99.6, 99.7, 99.8, 99.9 or 100% complementary, or any range derivable therein, to the 5′ to 3′ sequence of a mature miRNA, particularly a mature, naturally occurring miRNA. One of skill in the art could use a portion of the probe sequence that is complementary to the sequence of a mature miRNA as the sequence for a miRNA inhibitor. Moreover, that portion of the probe sequence can be altered so that it is still 90% complementary to the sequence of a mature miRNA.

[0112] In some embodiments, of the invention, a synthetic miRNA contains one or more design elements. These design elements include, but are not limited to: (i) a replacement group for the phosphate or hydroxyl of the nucleotide at the 5′ terminus of the complementary region; (ii) one or more sugar modifications in the first or last 1 to 6 residues of the complementary region; or, (iii) noncomplementarity between one or more nucleotides in the last 1 to 5 residues at the 3′ end of the complementary region and the corresponding nucleotides of the miRNA region.

[0113] In certain embodiments, a synthetic miRNA has a nucleotide at its 5′ end of the complementary region in which the phosphate and/or hydroxyl group has been replaced with another chemical group (referred to as the “replacement design”). In some cases, the phosphate group is replaced, while in others, the hydroxyl group has been replaced. In particular embodiments, the replacement group is biotin, an amine group, a lower alkylamine group, an aminohexyl phosphate group, an acetyl group, 2′O-Me (2′oxygen-methyl), DMTO (4,4′-dimethoxytrityl with oxygen), fluoroscein, a thiol, or acridine, though other replacement groups are well known to those of skill in the art and can be used as well. This design element can also be used with a miRNA inhibitor.

[0114] Additional embodiments concern a synthetic miRNA having one or more sugar modifications in the first or last 1 to 6 residues of the complementary region (referred to as the “sugar replacement design”). In certain cases, there is one or more sugar modifications in the first 1, 2, 3, 4, 5, 6 or more residues of the complementary region, or any range derivable therein. In additional cases, there is one or more sugar modifications in the last 1, 2, 3, 4, 5, 6 or more residues of the complementary region, or any range derivable therein, have a sugar modification. It will be understood that the terms “first” and “last” are with respect to the order of residues from the 5′ end to the 3′ end of the region. In particular embodiments, the sugar modification is a 2′O-Me modification, a 2° F. modification, a 2′H modification, a 2′amino modification, a 4′ribose modification, or a phosphorothioate modification on the carboxy group linked to the carbon at position 6. In further embodiments, there is one or more sugar modifications in the first or last 2 to 4 residues of the complementary region or the first or last 4 to 6 residues of the complementary region. This design element can also be used with a miRNA inhibitor. Thus, a miRNA inhibitor can have this design element and/or a replacement group on the nucleotide at the 5′ terminus, as discussed above.

[0115] In other embodiments of the invention, there is a synthetic miRNA in which one or more nucleotides in the last 1 to 5 residues at the 3′ end of the complementary region are not complementary to the corresponding nucleotides of the miRNA region (“noncomplementarity”) (referred to as the “noncomplementarity design”). The noncomplementarity may be in the last 1, 2, 3, 4, and/or 5 residues of the complementary miRNA. In certain embodiments, there is noncomplementarity with at least 2 nucleotides in the complementary region.

[0116] It is contemplated that synthetic miRNA of the invention have one or more of the replacement, sugar modification, or noncomplementarity designs. In certain cases, synthetic RNA molecules have two of them, while in others these molecules have all three designs in place.

[0117] The miRNA region and the complementary region may be on the same or separate polynucleotides. In cases in which they are contained on or in the same polynucleotide, the miRNA molecule will be considered a single polynucleotide. In embodiments in which the different regions are on separate polynucleotides, the synthetic miRNA will be considered to be comprised of two polynucleotides.

[0118] When the RNA molecule is a single polynucleotide, there is a linker region between the miRNA region and the complementary region. In some embodiments, the single polynucleotide is capable of forming a hairpin loop structure as a result of bonding between the miRNA region and the complementary region. The linker constitutes the hairpin loop. It is contemplated that in some embodiments, the linker region is, is at least, or is at most 2, 3, 4, 5, 6, 7, 8, 9, 10, 11, 12, 13, 14, 15, 16, 17, 18, 19, 20, 21, 22, 23, 24, 25, 26, 27, 28, 29, 30, 31, 32, 33, 34, 35, 36, 37, 38, 39, or 40 residues in length, or any range derivable therein. In certain embodiments, the linker is between 3 and 30 residues (inclusive) in length.

[0119] In addition to having a miRNA region and a complementary region, there may be flanking sequences as well at either the 5′ or 3′ end of the region. In some embodiments, there is or is at least 1, 2, 3, 4, 5, 6, 7, 8, 9, 10 nucleotides or more, or any range derivable therein, flanking one or both sides of these regions.

[0120] Methods of the invention include reducing or eliminating activity of one or more miRNAs in a cell comprising introducing into a cell a miRNA inhibitor; or supplying or enhancing the activity of one or more miRNAs in a cell. The present invention also concerns inducing certain cellular characteristics by providing to a cell a particular nucleic acid, such as a specific synthetic miRNA molecule or a synthetic miRNA inhibitor molecule. However, in methods of the invention, the miRNA molecule or miRNA inhibitor need not be synthetic. They may have a sequence that is identical to a naturally occurring miRNA or they may not have any design modifications. In certain embodiments, the miRNA molecule and/or a miRNA inhibitor are synthetic, as discussed above.

[0121] The particular nucleic acid molecule provided to the cell is understood to correspond to a particular miRNA in the cell, and thus, the miRNA in the cell is referred to as the “corresponding miRNA.” In situations in which a named miRNA molecule is introduced into a cell, the corresponding miRNA will be understood to be the induced miRNA. It is contemplated, however, that the miRNA molecule introduced into a cell is not a mature miRNA but is capable of becoming a mature miRNA under the appropriate physiological conditions. In cases in which a particular corresponding miRNA is being inhibited by a miRNA inhibitor, the particular miRNA will be referred to as the targeted miRNA. It is contemplated that multiple corresponding miRNAs may be involved. In particular embodiments, more than one miRNA molecule is introduced into a cell. Moreover, in other embodiments, more than one miRNA inhibitor is introduced into a cell. Furthermore, a combination of miRNA molecule(s) and miRNA inhibitor(s) may be introduced into a cell.

[0122] Methods include identifying a cell or patient in need of inducing those cellular characteristics. Also, it will be understood that an amount of a synthetic nucleic acid that is provided to a cell or organism is an “effective amount,” which refers to an amount needed to achieve a desired goal, such as inducing a particular cellular characteristic(s).

[0123] In certain embodiments of the methods include providing or introducing to a cell a nucleic acid molecule corresponding to a mature miRNA in the cell in an amount effective to achieve a desired physiological result.

[0124] Moreover, methods can involve providing synthetic or nonsynthetic miRNA molecules. It is contemplated that in these embodiments, methods may or may not be limited to providing only one or more synthetic miRNA molecules or only on or more nonsynthetic miRNA molecules. Thus, in certain embodiments, methods may involve providing both synthetic and nonsynthetic miRNA molecules. In this situation, a cell or cells are most likely provided a synthetic miRNA molecule corresponding to a particular miRNA and a nonsynthetic miRNA molecule corresponding to a different miRNA. Furthermore, any method articulated a list of miRNAs using Markush group language may be articulated without the Markush group language and a disjunctive article (i.e., or) instead, and vice versa.

[0125] In some embodiments, there is a method for reducing or inhibiting cell proliferation in a cell comprising introducing into or providing to the cell an effective amount of (i) a miRNA inhibitor molecule or (ii) a synthetic or nonsynthetic miRNA molecule that corresponds to a miRNA sequence. In certain embodiments the methods involves introducing into the cell an effective amount of (i) a miRNA inhibitor molecule having a 5′ to 3′ sequence that is at least 90% complementary to the 5′ to 3′ sequence of one or more mature miRNA described herein.

[0126] Certain embodiments of the invention include methods of treating a pancreatic condition. In one aspect, the method comprises contacting a pancreatic cell with one or more nucleic acid, synthetic miRNA, or miRNA comprising at least one nucleic acid segment having all or a portion of a miRNA sequence. The segment may be 5, 6, 7, 8, 9, 10, 11, 12, 13, 14, 15, 16, 17, 18, 19, 20, 21, 22, 23, 24, 25, 30 or more nucleotides or nucleotide analog, including all integers there between. An aspect of the invention includes the modulation of a miRNA or a mRNA within a target cell.

[0127] Typically, an endogenous gene, miRNA or mRNA is modulated in the cell. In particular embodiments, the nucleic acid sequence comprises at least one segment that is at least 70, 75, 80, 85, 90, 95, or 100% identical in nucleic acid sequence to one or more miRNA sequence described herein. Modulation of the expression or processing of an endogenous gene, miRNA, or mRNA can be through modulation of the processing of a mRNA, such processing including transcription, transportation and/or translation with in a cell. Modulation may also be effected by the inhibition or enhancement of miRNA activity with a cell, tissue, or organ. Such processing may effect the expression of an encoded product or the stability of the mRNA. In still other embodiments, a nucleic acid sequence can comprise a modified nucleic acid sequence.

[0128] Methods of the invention can further comprise administering a second therapy, such as chemotherapy, radiotherapy, surgery, or immunotherapy. The nucleic acid can be transcribed from a nucleic acid vector, such as a plasmid vector or a viral vector.

[0129] Method of treating a cancerous or hyperproliferative condition include contacting or administering to a target cell with one or more nucleic acid comprise a miRNA sequence, wherein expression of an endogenous miRNA is modulated in cancerous cell; where the miRNA sequence is at least 70, 75, 80, 85% or more identical to one or more of the identified miRNAs.

[0130] The methods may further comprise administering a second therapy. The second therapy can be, but is not limited to chemotherapy, radiotherapy, surgery, or immunotherapy.

[0131] In still further aspects, one or more miRNA are transcribed from a nucleic acid vector, such as a plasmid or viral vector.

[0132] Synthetic nucleic acids can be administered to the subject or patient using modes of administration that are well known to those of skill in the art, particularly for therapeutic applications. It is particularly contemplated that a patient is human or any other mammal or animal having miRNA.

[0133] It will be understood in methods of the invention that a cell or other biological matter such as an organism (including patients) can be provided a miRNA or miRNA molecule corresponding to a particular miRNA by administering to the cell or organism a nucleic acid molecule that functions as the corresponding miRNA once inside the cell. The form of the molecule provided to the cell may not be the form that acts as a miRNA once inside the cell. Thus, it is contemplated that in some embodiments, biological matter is provided a synthetic miRNA or a nonsynthetic miRNA, such as one that becomes processed into a mature and active miRNA once it has access to the cell's miRNA processing machinery. In certain embodiments, it is specifically contemplated that the miRNA molecule provided to the biological matter is not a mature miRNA molecule but a nucleic acid molecule that can be processed into the mature miRNA once it is accessible to miRNA processing machinery. The term “nonsynthetic” in the context of miRNA means that the miRNA is not “synthetic,” as defined herein. Furthermore, it is contemplated that in embodiments of the invention that concern the use of synthetic miRNAs, the use of corresponding nonsynthetic miRNAs is also considered an aspect of the invention, and vice versa.

[0134] In other embodiments, the methods involve reducing cell viability comprising introducing into or providing to the cell an effective amount of (i) a miRNA inhibitor molecule or (ii) a synthetic or nonsynthetic miRNA molecule that corresponds to a miRNA sequence. Methods for inducing apoptosis have a number of therapeutic applications including, but not limited to, the treatment of cancer.

[0135] The present invention also concerns using miRNA compositions to treat diseases or conditions or to prepare therapeutics for the treatment of diseases or conditions. It is contemplated that 1, 2, 3, 4, 5, 6, 7, 8, 9, 10, 11, 12, 13, 14, 15, 16, 17, 18, 19, 20, 21, 22, 23, 24, 25, 26, 27, 28, 29, 30, 31, 32, 33, 34, 35, 36, 37, 38, 39, or 40 more miRNA (or any range derivable therein) may be used for these embodiments. In certain embodiments, methods involve one or more miRNA inhibitors and/or a miRNA molecules corresponding to any of these miRNAs, particularly for the treatment or prevention of cancer. Cancer includes, but is not limited to, malignant cancers, tumors, metastatic cancers, unresectable cancers, chemo- and/or radiation-resistant cancers, and terminal cancers.

[0136] It will be understood that shorthand notations are employed such that a generic description of a miRNA refers to any of its gene family members (distinguished by a number), unless otherwise indicated. It is understood by those of skill in the art that a “gene family” refers to a group of genes having the same miRNA coding sequence. Typically, members of a gene family are identified by a number following the initial designation. For example, miR-16-1 and miR-16-2 are members of the miR-16 gene family and “miR-7” refers to miR-7-1, miR-7-2 and miR-7-3. Moreover, unless otherwise indicated, a shorthand notation refers to related miRNAs (distinguished by a letter). Thus, “let-7,” for example, refers to let-7a-1, let7-a-2, let-7b, let-7c, let-7d, let-7e, let-7f-1, and let-7f-2.” Exceptions to these shorthand notations will be otherwise identified.

[0137] It will be understood that the term “providing” an agent is used to include “administering” the agent to a patient.

[0138] In certain embodiments, methods also include targeting a miRNA to modulate in a cell or organism. The term “targeting a miRNA to modulate” means a nucleic acid of the invention will be employed so as to modulate the selected miRNA. In some embodiments the modulation is achieved with a synthetic or non-synthetic miRNA that corresponds to the targeted miRNA, which effectively provides the targeted miRNA to the cell or organism (positive modulation). In other embodiments, the modulation is achieved with a miRNA inhibitor, which effectively inhibits the targeted miRNA in the cell or organism (negative modulation).

[0139] In some embodiments, the miRNA targeted to be modulated is a miRNA that affects a disease, condition, or pathway. In certain embodiments, the miRNA is targeted because a treatment can be provided by negative modulation of the targeted miRNA. In other embodiments, the miRNA is targeted because a treatment can be provided by positive modulation of the targeted miRNA.

[0140] In certain methods of the invention, there is a further step of administering the selected miRNA modulator to a cell, tissue, organ, or organism (collectively “biological matter”) in need of treatment related to modulation of the targeted miRNA or in need of the physiological or biological results discussed herein (such as with respect to a particular cellular pathway or result like decrease in cell viability). Consequently, in some methods of the invention there is a step of identifying a patient in need of treatment that can be provided by the miRNA modulator(s). It is contemplated that an effective amount of a miRNA modulator can be administered in some embodiments. In particular embodiments, there is a therapeutic benefit conferred on the biological matter, where a “therapeutic benefit” refers to an improvement in the one or more conditions or symptoms associated with a disease or condition or an improvement in the prognosis, duration, or status with respect to the disease. It is contemplated that a therapeutic benefit includes, but is not limited to, a decrease in pain, a decrease in morbidity, a decrease in a symptom. For example, with respect to cancer, it is contemplated that a therapeutic benefit can be inhibition of tumor growth, prevention of metastasis, reduction in number of metastases, inhibition of cancer cell proliferation, inhibition of cancer cell proliferation, induction of cell death in cancer cells, inhibition of angiogenesis near cancer cells, induction of apoptosis of cancer cells, reduction in pain, reduction in risk of recurrence, induction of chemo- or radiosensitivity in cancer cells, prolongation of life, and/or delay of death directly or indirectly related to cancer.

[0141] Furthermore, it is contemplated that the miRNA compositions may be provided as part of a therapy to a patient, in conjunction with traditional therapies or preventative agents. Moreover, it is contemplated that any method discussed in the context of therapy may be applied as preventatively, particularly in a patient identified to be potentially in need of the therapy or at risk of the condition or disease for which a therapy is needed.

[0142] In addition, methods of the invention concern employing one or more nucleic acids corresponding to a miRNA and a therapeutic drug. The nucleic acid can enhance the effect or efficacy of the drug, reduce any side effects or toxicity, modify its bioavailability, and/or decrease the dosage or frequency needed. In certain embodiments, the therapeutic drug is a cancer therapeutic. Consequently, in some embodiments, there is a method of treating cancer in a patient comprising administering to the patient the cancer therapeutic and an effective amount of at least one miRNA molecule that improves the efficacy of the cancer therapeutic or protects non-cancer cells. Cancer therapies also include a variety of combination therapies with both chemical and radiation based treatments. Combination chemotherapies include but are not limited to, for example, bevacizumab, cisplatin (CDDP), carboplatin, EGFR inhibitors (gefitinib and cetuximab), procarbazine, mechlorethamine, cyclophosphamide, camptothecin, COX-2 inhibitors (e.g., celecoxib) ifosfamide, melphalan, chlorambucil, busulfan, nitrosurea, dactinomycin, daunorubicin, doxorubicin (adriamycin), bleomycin, plicomycin, mitomycin, etoposide (VP16), tamoxifen, raloxifene, estrogen receptor binding agents, taxol, taxotere, gemcitabien, navelbine, farnesyl-protein transferase inhibitors, transplatinum, 5-fluorouracil, vincristin, vinblastin and methotrexate, or any analog or derivative variant of the foregoing.

[0143] Generally, inhibitors of miRNAs can be given to achieve the opposite effect as compared to when nucleic acid molecules corresponding to the mature miRNA are given. Similarly, nucleic acid molecules corresponding to the mature miRNA can be given to achieve the opposite effect as compared to when inhibitors of the miRNA are given. For example, miRNA molecules that increase cell proliferation can be provided to cells to increase proliferation or inhibitors of such molecules can be provided to cells to decrease cell proliferation. The present invention contemplates these embodiments in the context of the different physiological effects observed with the different miRNA molecules and miRNA inhibitors disclosed herein. These include, but are not limited to, the following physiological effects: increase and decreasing cell proliferation, increasing or decreasing apoptosis, increasing transformation, increasing or decreasing cell viability, activating ERK, activating/inducing or inhibiting hTert, inhibit stimulation of Stat3, reduce or increase viable cell number, and increase or decrease number of cells at a particular phase of the cell cycle. Methods of the invention are generally contemplated to include providing or introducing one or more different nucleic acid molecules corresponding to one or more different miRNA molecules. It is contemplated that the following, at least the following, or at most the following number of different nucleic acid molecules may be provided or introduced: 1, 2, 3, 4, 5, 6, 7, 8, 9, 10, 11, 12, 13, 14, 15, 16, 17, 18, 19, 20, 21, 22, 23, 24, 25, 26, 27, 28, 29, 30, 31, 32, 33, 34, 35, 36, 37, 38, 39, 40, 41, 42, 43, 44, 45, 46, 47, 48, 49, 50, 51, 52, 53, 54, 55, 56, 57, 58, 59, 60, 61, 62, 63, 64, 65, 66, 67, 68, 69, 70, 71, 72, 73, 74, 75, 76, 77, 78, 79, 80, 81, 82, 83, 84, 85, 86, 87, 88, 89, 90, 91, 92, 93, 94, 95, 96, 97, 98, 99, 100, or any range derivable therein. This also applies to the number of different miRNA molecules that can be provided or introduced into a cell.

[0144] 1. Nucleobases

[0145] As used herein a “nucleobase” refers to a heterocyclic base, such as for example a naturally occurring nucleobase (i.e., an A, T, G, C or U) found in at least one naturally occurring nucleic acid (i.e., DNA and RNA), and naturally or non-naturally occurring derivative(s) and analogs of such a nucleobase. A nucleobase generally can form one or more hydrogen bonds (“anneal” or “hybridize”) with at least one naturally occurring nucleobase in manner that may substitute for naturally occurring nucleobase pairing (e.g., the hydrogen bonding between A and T, G and C, and A and U).

[0146] “Purine” and/or “pyrimidine” nucleobase(s) encompass naturally occurring purine and/or pyrimidine nucleobases and also derivative(s) and analog(s) thereof, including but not limited to, those a purine or pyrimidine substituted by one or more of an alkyl, carboxyalkyl, amino, hydroxyl, halogen (i.e., fluoro, chloro, bromo, or iodo), thiol or alkylthiol moiety. Preferred alkyl (e.g., alkyl, carboxyalkyl, etc.) moieties comprise of from about 1, about 2, about 3, about 4, about 5, to about 6 carbon atoms. Other non-limiting examples of a purine or pyrimidine include a deazapurine, a 2,6-diaminopurine, a 5-fluorouracil, a xanthine, a hypoxanthine, a 8-bromoguanine, a 8-chloroguanine, a bromothymine, a 8-aminoguanine, a 8-hydroxyguanine, a 8-methylguanine, a 8-thioguanine, an azaguanine, a 2-aminopurine, a 5-ethylcytosine, a 5-methylcyosine, a 5-bromouracil, a 5-ethyluracil, a 5-iodouracil, a 5-chlorouracil, a 5-propyluracil, a thiouracil, a 2-methyladenine, a methylthioadenine, a N,N-diemethyladenine, an azaadenines, a 8-bromoadenine, a 8-hydroxyadenine, a 6-hydroxyaminopurine, a 6-thiopurine, a 4-(6-aminohexyl/cytosine), and the like. Other examples are well known to those of skill in the art.

[0147] A nucleobase may be comprised in a nucleoside or nucleotide, using any chemical or natural synthesis method described herein or known to one of ordinary skill in the art. Such nucleobase may be labeled or it may be part of a molecule that is labeled and contains the nucleobase.

[0148] As used herein, a “nucleoside” refers to an individual chemical unit comprising a nucleobase covalently attached to a nucleobase linker moiety. A non-limiting example of a “nucleobase linker moiety” is a sugar comprising 5-carbon atoms (i.e., a “5-carbon sugar”), including but not limited to a deoxyribose, a ribose, an arabinose, or a derivative or an analog of a 5-carbon sugar. Non-limiting examples of a derivative or an analog of a 5-carbon sugar include a 2′-fluoro-2′-deoxyribose or a carbocyclic sugar where a carbon is substituted for an oxygen atom in the sugar ring. Different types of covalent attachment(s) of a nucleobase to a nucleobase linker moiety are known in the art (Komberg and Baker, 1992).

[0149] As used herein, a “nucleotide” refers to a nucleoside further comprising a “backbone moiety”. A backbone moiety generally covalently attaches a nucleotide to another molecule comprising a nucleotide, or to another nucleotide to form a nucleic acid. The “backbone moiety” in naturally occurring nucleotides typically comprises a phosphorus moiety, which is covalently attached to a 5-carbon sugar. The attachment of the backbone moiety typically occurs at either the 3′- or 5′-position of the 5-carbon sugar. However, other types of attachments are known in the art, particularly when a nucleotide comprises derivatives or analogs of a naturally occurring 5-carbon sugar or phosphorus moiety.

[0150] 2. Nucleic Acid Analogs

[0151] A nucleic acid may comprise, or be composed entirely of, a derivative or analog of a nucleobase, a nucleobase linker moiety and/or backbone moiety that may be present in a naturally occurring nucleic acid. RNA with nucleic acid analogs may also be labeled according to methods of the invention. As used herein a “derivative” refers to a chemically modified or altered form of a naturally occurring molecule, while the terms “mimic” or “analog” refer to a molecule that may or may not structurally resemble a naturally occurring molecule or moiety, but possesses similar functions. As used herein, a “moiety” generally refers to a smaller chemical or molecular component of a larger chemical or molecular structure. Nucleobase, nucleoside and nucleotide analogs or derivatives are well known in the art, and have been described (see for example, Scheit, 1980, incorporated herein by reference).

[0152] Additional non-limiting examples of nucleosides, nucleotides or nucleic acids comprising 5-carbon sugar and/or backbone moiety derivatives or analogs, include those in: U.S. Pat. No. 5,681,947, which describes oligonucleotides comprising purine derivatives that form triple helixes with and/or prevent expression of dsDNA; U.S. Pat. Nos. 5,652,099 and 5,763,167, which describe nucleic acids incorporating fluorescent analogs of nucleosides found in DNA or RNA, particularly for use as fluorescent nucleic acids probes; U.S. Pat. No. 5,614,617, which describes oligonucleotide analogs with substitutions on pyrimidine rings that possess enhanced nuclease stability; U.S. Pat. Nos. 5,670,663, 5,872,232 and 5,859,221, which describe oligonucleotide analogs with modified 5-carbon sugars (i.e., modified 2′-deoxyfuranosyl moieties) used in nucleic acid detection; U.S. Pat. No. 5,446,137, which describes oligonucleotides comprising at least one 5-carbon sugar moiety substituted at the 4′ position with a substituent other than hydrogen that can be used in hybridization assays; U.S. Pat. No. 5,886,165, which describes oligonucleotides with both deoxyribonucleotides with 3′-5′ internucleotide linkages and ribonucleotides with 2′-5′ internucleotide linkages; U.S. Pat. No. 5,714,606, which describes a modified internucleotide linkage wherein a 3′-position oxygen of the internucleotide linkage is replaced by a carbon to enhance the nuclease resistance of nucleic acids; U.S. Pat. No. 5,672,697, which describes oligonucleotides containing one or more 5′ methylene phosphonate internucleotide linkages that enhance nuclease resistance; U.S. Pat. Nos. 5,466,786 and 5,792,847, which describe the linkage of a substituent moiety which may comprise a drug or label to the 2′ carbon of an oligonucleotide to provide enhanced nuclease stability and ability to deliver drugs or detection moieties; U.S. Pat. No. 5,223,618, which describes oligonucleotide analogs with a 2 or 3 carbon backbone linkage attaching the 4′ position and 3′ position of adjacent 5-carbon sugar moiety to enhanced cellular uptake, resistance to nucleases and hybridization to target RNA; U.S. Pat. No. 5,470,967, which describes oligonucleotides comprising at least one sulfamate or sulfamide internucleotide linkage that are useful as nucleic acid hybridization probe; U.S. Pat. Nos. 5,378,825, 5,777,092, 5,623,070, 5,610,289 and 5,602,240, which describe oligonucleotides with three or four atom linker moiety replacing phosphodiester backbone moiety used for improved nuclease resistance, cellular uptake, and regulating RNA expression; U.S. Pat. No. 5,858,988, which describes hydrophobic carrier agent attached to the 2′-O position of oligonucleotides to enhanced their membrane permeability and stability; U.S. Pat. No. 5,214,136, which describes oligonucleotides conjugated to anthraquinone at the 5′ terminus that possess enhanced hybridization to DNA or RNA; enhanced stability to nucleases; U.S. Pat. No. 5,700,922, which describes PNA-DNA-PNA chimeras wherein the DNA comprises 2′-deoxy-erythro-pentofuranosyl nucleotides for enhanced nuclease resistance, binding affinity, and ability to activate RNase H; and U.S. Pat. No. 5,708,154, which describes RNA linked to a DNA to form a DNA-RNA hybrid; U.S. Pat. No. 5,728,525, which describes the labeling of nucleoside analogs with a universal fluorescent label.

[0153] Additional teachings for nucleoside analogs and nucleic acid analogs are U.S. Pat. No. 5,728,525, which describes nucleoside analogs that are end-labeled; U.S. Pat. Nos. 5,637,683, 6,251,666 (L-nucleotide substitutions), and 5,480,980 (7-deaza-2′deoxyguanosine nucleotides and nucleic acid analogs thereof).

[0154] Additional non-limiting examples of nucleosides, nucleotides or nucleic acids include

[0155] those in: U.S. Pat. Nos. 5,681,947, 5,652,099 and 5,763,167, 5,614,617, 5,670,663, 5,872,232, 5,859,221, 5,446,137, 5,886,165, 5,714,606, 5,672,697, 5,466,786, 5,792,847, 5,223,618, 5,470,967, 5,378,825, 5,777,092, 5,623,070, 5,610,289, 5,602,240, 5,858,988, 5,214,136, 5,700,922, 5,708,154, 5,728,525, 5,637,683, 6,251,666, 5,480,980, and 5,728,525, each of which is incorporated herein by reference in its entirety.

[0156] 3. Modified Nucleotides

[0157] Labeling methods and kits of the invention specifically contemplate the use of nucleotides that are both modified for attachment of a label and can be incorporated into a miRNA molecule. Such nucleotides include those that can be labeled with a dye, including a fluorescent dye, or with a molecule such as biotin. Labeled nucleotides are readily available; they can be acquired commercially or they can be synthesized by reactions known to those of skill in the art.

[0158] Modified nucleotides for use in the invention may not be naturally occurring nucleotides, but instead, refer to prepared nucleotides that have a reactive moiety on them. Specific reactive functionalities of interest include: amino, sulfhydryl, sulfoxyl, aminosulfhydryl, azido, epoxide, isothiocyanate, isocyanate, anhydride, monochlorotriazine, dichlorotriazine, mono- or dihalogen substituted pyridine, mono- or disubstituted diazine, maleimide, epoxide, aziridine, sulfonyl halide, acid halide, alkyl halide, aryl halide, alkylsulfonate, N-hydroxysuccinimide ester, imido ester, hydrazine, azidonitrophenyl, azide, 3-(2-pyridyl dithio)-propionamide, glyoxal, aldehyde, iodoacetyl, cyanomethyl ester, p-nitrophenyl ester, o-nitrophenyl ester, hydroxypyridine ester, carbonyl imidazole, and the other such chemical groups. In some embodiments, the reactive functionality may be bonded directly to a nucleotide, or it may be bonded to the nucleotide through a linking group. The functional moiety and any linker cannot substantially impair the ability of the nucleotide to be added to the miRNA or to be labeled. Representative linking groups include carbon containing linking groups, typically ranging from about 2 to 18, usually from about 2 to 8 carbon atoms, where the carbon containing linking groups may or may not include one or more heteroatoms, e.g. S, O, N etc., and may or may not include one or more sites of unsaturation. Of particular interest in many embodiments are alkyl linking groups, typically lower alkyl linking groups of 1 to 16, usually 1 to 4 carbon atoms, where the linking groups may include one or more sites of unsaturation. The functionalized nucleotides (or primers) used in the above methods of functionalized target generation may be fabricated using known protocols or purchased from commercial vendors, e.g., Sigma, Roche, Ambion, Biosearch Technologies and NEN. Functional groups may be prepared according to ways known to those of skill in the art, including the representative information found in U.S. Pat. Nos. 4,404,289; 4,405,711; 4,337,063 and 5,268,486, and U.K. Patent 1,529,202, which are all incorporated by reference.

[0159] Amine-modified nucleotides are used in several embodiments of the invention. The amine-modified nucleotide is a nucleotide that has a reactive amine group for attachment of the label. It is contemplated that any ribonucleotide (G, A, U, or C) or deoxyribonucleotide (G, A, T, or C) can be modified for labeling. Examples include, but are not limited to, the following modified ribo- and deoxyribo-nucleotides: 5-(3-aminoallyl)-UTP; 8-[(4-amino)butyl]-amino-ATP and 8-[(6-amino)butyl]-amino-ATP; N6-(4-amino)butyl-ATP, N6-(6-amino)butyl-ATP, N4-[2,2-oxy-bis-(ethylamine)]-CTP; N6-(6-Amino)hexyl-ATP; 8-[(6-Amino)hexyl]-amino-ATP; 5-propargylamino-CTP, 5-propargylamino-UTP; 5-(3-aminoallyl)-dUTP; 8-[(4-amino)butyl]-amino-dATP and 8-[(6-amino)butyl]-amino-dATP; N6-(4-amino)butyl-dATP, N6-(6-amino)butyl-dATP, N4-[2,2-oxy-bis-(ethylamine)]-dCTP; N6-(6-Amino)hexyl-dATP; 8-[(6-Amino)hexyl]-amino-dATP; 5-propargylamino-dCTP, and 5-propargylamino-dUTP. Such nucleotides can be prepared according to methods known to those of skill in the art. Moreover, a person of ordinary skill in the art could prepare other nucleotide entities with the same amine-modification, such as a 5-(3-aminoallyl)-CTP, GTP, ATP, dCTP, dGTP, dTTP, or dUTP in place of a 5-(3-aminoallyl)-UTP.

[0160] B. Preparation of Nucleic Acids

[0161] A nucleic acid may be made by any technique known to one of ordinary skill in the art, such as for example, chemical synthesis, enzymatic production or biological production. It is specifically contemplated that miRNA probes of the invention are chemically synthesized.

[0162] In some embodiments of the invention, miRNAs are recovered or isolated from a biological sample. The miRNA may be recombinant or it may be natural or endogenous to the cell (produced from the cell's genome). It is contemplated that a biological sample may be treated in a way so as to enhance the recovery of small RNA molecules such as miRNA. U.S. patent application Ser. No. 10/667,126 describes such methods and it is specifically incorporated by reference herein. Generally, methods involve lysing cells with a solution having guanidinium and a detergent.

[0163] Alternatively, nucleic acid synthesis is performed according to standard methods. See, for example, Itakura and Riggs (1980). Additionally, U.S. Pat. Nos. 4,704,362, 5,221,619, and 5,583,013 each describe various methods of preparing synthetic nucleic acids. Non-limiting examples of a synthetic nucleic acid (e.g., a synthetic oligonucleotide), include a nucleic acid made by in vitro chemically synthesis using phosphotriester, phosphite, or phosphoramidite chemistry and solid phase techniques such as described in EP 266,032, incorporated herein by reference, or via deoxynucleoside H-phosphonate intermediates as described by Froehler et al., 1986 and U.S. Pat. No. 5,705,629, each incorporated herein by reference. In the methods of the present invention, one or more oligonucleotide may be used. Various different mechanisms of oligonucleotide synthesis have been disclosed in for example, U.S. Pat. Nos. 4,659,774, 4,816,571, 5,141,813, 5,264,566, 4,959,463, 5,428,148, 5,554,744, 5,574,146, 5,602,244, each of which is incorporated herein by reference.

[0164] A non-limiting example of an enzymatically produced nucleic acid include one produced by enzymes in amplification reactions such as PCR™ (see for example, U.S. Pat. Nos. 4,683,202 and 4,682,195, each incorporated herein by reference), or the synthesis of an oligonucleotide described in U.S. Pat. No. 5,645,897, incorporated herein by reference. A non-limiting example of a biologically produced nucleic acid includes a recombinant nucleic acid produced (i.e., replicated) in a living cell, such as a recombinant DNA vector replicated in bacteria (see for example, Sambrook et al., 2001, incorporated herein by reference).

[0165] Oligonucleotide synthesis is well known to those of skill in the art. Various different mechanisms of oligonucleotide synthesis have been disclosed in for example, U.S. Pat. Nos. 4,659,774, 4,816,571, 5,141,813, 5,264,566, 4,959,463, 5,428,148, 5,554,744, 5,574,146, 5,602,244, each of which is incorporated herein by reference.

[0166] Basically, chemical synthesis can be achieved by the diester method, the triester method polynucleotides phosphorylase method and by solid-phase chemistry. The diester method was the first to be developed to a usable state, primarily by Khorana and co-workers. (Khorana, 1979). The basic step is the joining of two suitably protected deoxynucleotides to form a dideoxynucleotide containing a phosphodiester bond.

[0167] The main difference between the diester and triester methods is the presence in the latter of an extra protecting group on the phosphate atoms of the reactants and products (Itakura et al, 1975). Purification's are typically done in chloroform solutions. Other improvements in the method include (i) the block coupling of trimers and larger oligomers, (ii) the extensive use of high-performance liquid chromatography for the purification of both intermediate and final products, and (iii) solid-phase synthesis.

[0168] Recombinant methods for producing nucleic acids in a cell are well known to those of skill in the art. These include the use of vectors (viral and non-viral), plasmids, cosmids, and other vehicles for delivering a nucleic acid to a cell, which may be the target cell (e.g., a cancer cell) or simply a host cell (to produce large quantities of the desired RNA molecule). Alternatively, such vehicles can be used in the context of a cell free system so long as the reagents for generating the RNA molecule are present. Such methods include those described in Sambrook, 2003, Sambrook, 2001 and Sambrook, 1989, which are hereby incorporated by reference.

[0169] In certain embodiments, the present invention concerns nucleic acid molecules that are not synthetic. In some embodiments, the nucleic acid molecule has a chemical structure of a naturally occurring nucleic acid and a sequence of a naturally occurring nucleic acid, such as the exact and entire sequence of a single stranded primary miRNA (see Lee 2002), a single-stranded precursor miRNA, or a single-stranded mature miRNA. In addition to the use of recombinant technology, such non-synthetic nucleic acids may be generated chemically, such as by employing technology used for creating oligonucleotides.

[0170] C. Isolation of Nucleic Acids

[0171] Nucleic acids may be isolated using techniques well known to those of skill in the art, though in particular embodiments, methods for isolating small nucleic acid molecules, and/or isolating RNA molecules can be employed. Chromatography is a process often used to separate or isolate nucleic acids from protein or from other nucleic acids. Such methods can involve electrophoresis with a gel matrix, filter columns, alcohol precipitation, and/or other chromatography. If miRNA from cells is to be used or evaluated, methods generally involve lysing the cells with a chaotropic (e.g., guanidinium isothiocyanate) and/or detergent (e.g., N-lauroyl sarcosine) prior to implementing processes for isolating particular populations of RNA.

[0172] In particular methods for separating miRNA from other nucleic acids, a gel matrix is prepared using polyacrylamide, though agarose can also be used. The gels may be graded by concentration or they may be uniform. Plates or tubing can be used to hold the gel matrix for electrophoresis. Usually one-dimensional electrophoresis is employed for the separation of nucleic acids. Plates are used to prepare a slab gel, while the tubing (glass or rubber, typically) can be used to prepare a tube gel. The phrase “tube electrophoresis” refers to the use of a tube or tubing, instead of plates, to form the gel. Materials for implementing tube electrophoresis can be readily prepared by a person of skill in the art or purchased, such as from C.B.S. Scientific Co., Inc. or Scie-Plas.

[0173] Methods may involve the use of organic solvents and/or alcohol to isolate nucleic acids, particularly miRNA used in methods and compositions of the invention. Some embodiments are described in U.S. patent application Ser. No. 10/667,126, which is hereby incorporated by reference. Generally, this disclosure provides methods for efficiently isolating small RNA molecules from cells comprising: adding an alcohol solution to a cell lysate and applying the alcohol/lysate mixture to a solid support before eluting the RNA molecules from the solid support. In some embodiments, the amount of alcohol added to a cell lysate achieves an alcohol concentration of about 55% to 60%. While different alcohols can be employed, ethanol works well. A solid support may be any structure, and it includes beads, filters, and columns, which may include a mineral or polymer support with electronegative groups. A glass fiber filter or column has worked particularly well for such isolation procedures.

[0174] In specific embodiments, miRNA isolation processes include: (a) lysing cells in the sample with a lysing solution comprising guanidinium, wherein a lysate with a concentration of at least about 1 M guanidinium is produced; (b) extracting miRNA molecules from the lysate with an extraction solution comprising phenol; (c) adding to the lysate an alcohol solution for form a lysate/alcohol mixture, wherein the concentration of alcohol in the mixture is between about 35% to about 70%; (d) applying the lysate/alcohol mixture to a solid support; (e) eluting the miRNA molecules from the solid support with an ionic solution; and, (f) capturing the miRNA molecules. Typically the sample is dried down and resuspended in a liquid and volume appropriate for subsequent manipulation.

### II. Labels and Labeling Techniques

[0175] In some embodiments, the present invention concerns miRNA or mRNA that are labeled. It is contemplated that miRNA or mRNA may first be isolated and/or purified prior to labeling. This may achieve a reaction that more efficiently labels the miRNA, as opposed to other RNA in a sample in which the miRNA is not isolated or purified prior to labeling. In many embodiments of the invention, the label is non-radioactive. Generally, nucleic acids may be labeled by adding labeled nucleotides (one-step process) or adding nucleotides and labeling the added nucleotides (two-step process).

[0176] A. Labeling Techniques

[0177] In some embodiments, nucleic acids are labeled by catalytically adding to the nucleic acid an already labeled nucleotide or nucleotides. One or more labeled nucleotides can be added to miRNA molecules. See U.S. Pat. No. 6,723,509, which is hereby incorporated by reference.

[0178] In other embodiments, an unlabeled nucleotide or nucleotides is catalytically added to a miRNA, and the unlabeled nucleotide is modified with a chemical moiety that enables it to be subsequently labeled. In embodiments of the invention, the chemical moiety is a reactive amine such that the nucleotide is an amine-modified nucleotide. Examples of amine-modified nucleotides are well known to those of skill in the art, many being commercially available such as from Ambion, Sigma, Jena Bioscience, and TriLink.

[0179] In contrast to labeling of cDNA during its synthesis, the issue for labeling miRNA is how to label the already existing molecule. An enzyme using a di- or tri-phosphate ribonucleotide or deoxyribonucleotide as a substrate for its addition to a miRNA can be used. Moreover, in specific embodiments, it involves using a modified di- or tri-phosphate ribonucleotide, which is added to the 3′ end of a miRNA. Examples of sources for the enzymes include yeast, gram-negative bacteria such as E. coli, lactococcus lactis, and sheep pox virus. Enzymes capable of adding such nucleotides include, but are not limited to, poly(A) polymerase, terminal transferase, and polynucleotide phosphorylase. In specific embodiments of the invention, a ligase is contemplated as not being the enzyme used to add the label, and instead, a non-ligase enzyme is employed.

[0180] B. Labels

[0181] Labels on miRNA, miRNA probes, or RNA probes may be colorimetric (includes visible and UV spectrum, including fluorescent), luminescent, enzymatic, or positron emitting (including radioactive). The label may be detected directly or indirectly. Radioactive labels include ¹²⁵I, ³²P, ³³P, and ³⁵S. Examples of enzymatic labels include alkaline phosphatase, luciferase, horseradish peroxidase, and β-galactosidase. Labels can also be proteins with luminescent properties, e.g., green fluorescent protein and phycoerythrin.

[0182] The colorimetric and fluorescent labels contemplated for use as conjugates include, but are not limited to, Alexa Fluor dyes, BODIPY dyes, such as BODIPY FL; Cascade Blue; Cascade Yellow; coumarin and its derivatives, such as 7-amino-4-methylcoumarin, aminocoumarin and hydroxycoumarin; cyanine dyes, such as Cy3 and Cy5; eosins and erythrosins; fluorescein and its derivatives, such as fluorescein isothiocyanate; macrocyclic chelates of lanthanide ions, such as Quantum Dye™; Marina Blue; Oregon Green; rhodamine dyes, such as rhodamine red, tetramethylrhodamine and rhodamine 6G; Texas Red; fluorescent energy transfer dyes, such as thiazole orange-ethidium heterodimer; and, TOTAB.

[0183] Specific examples of dyes include, but are not limited to, those identified above and the following: Alexa Fluor 350, Alexa Fluor 405, Alexa Fluor 430, Alexa Fluor 488, Alexa Fluor 500. Alexa Fluor 514, Alexa Fluor 532, Alexa Fluor 546, Alexa Fluor 555, Alexa Fluor 568, Alexa Fluor 594, Alexa Fluor 610, Alexa Fluor 633, Alexa Fluor 647, Alexa Fluor 660, Alexa Fluor 680, Alexa Fluor 700, and, Alexa Fluor 750; amine-reactive BODIPY dyes, such as BODIPY 493/503, BODIPY 530/550, BODIPY 558/568, BODIPY 564/570, BODIPY 576/589, BODIPY 581/591, BODIPY 630/650, BODIPY 650/655, BODIPY FL, BODIPY R6G, BODIPY TMR, and, BODIPY-TR; Cy3, Cy5, 6-FAM, Fluorescein Isothiocyanate, HEX, 6-JOE, Oregon Green 488, Oregon Green 500, Oregon Green 514, Pacific Blue, REG, Rhodamine Green, Rhodamine Red, Renographin, ROX, SYPRO, TAMPA, 2′,4′,5′,7′-Tetrabromosulfonefluorescein, and TET.

[0184] Specific examples of fluorescently labeled ribonucleotides are available from Molecular Probes, and these include, Alexa Fluor 488-5-UTP, Fluorescein-12-UTP, BODIPY FL-14-UTP, BODIPY TMR-14-UTP, Tetramethylrhodamine-6-UTP, Alexa Fluor 546-14-UTP, Texas Red-5-UTP, and BODIPY TR-14-UTP. Other fluorescent ribonucleotides are available from Amersham Biosciences, such as Cy3-UTP and Cy5-UTP.

[0185] Examples of fluorescently labeled deoxyribonucleotides include Dinitrophenyl (DNP)-11-dUTP, Cascade Blue-7-dUTP, Alexa Fluor 488-5-dUTP, Fluorescein-12-dUTP, Oregon Green 488-5-dUTP, BODIPY FL-14-dUTP, Rhodamine Green-5-dUTP, Alexa Fluor 532-5-dUTP, BODIPY TMR-14-dUTP, Tetramethylrhodamine-6-dUTP, Alexa Fluor 546-14-dUTP, Alexa Fluor 568-5-dUTP, Texas Red-12-dUTP, Texas Red-5-dUTP, BODIPY TR-14-dUTP, Alexa Fluor 594-5-dUTP, BODIPY 630/650-14-dUTP, BODIPY 650/665-14-dUTP; Alexa Fluor 488-7-OBEA-dCTP, Alexa Fluor 546-16-OBEA-dCTP, Alexa Fluor 594-7-OBEA-dCTP, Alexa Fluor 647-12-OBEA-dCTP.

[0186] It is contemplated that nucleic acids may be labeled with two different labels. Furthermore, fluorescence resonance energy transfer (FRET) may be employed in methods of the invention (e.g., Klostermeier et al., 2002; Emptage, 2001; Didenko, 2001, each incorporated by reference).

[0187] Alternatively, the label may not be detectable per se, but indirectly detectable or allowing for the isolation or separation of the targeted nucleic acid. For example, the label could be biotin, digoxigenin, polyvalent cations, chelator groups and the other ligands, include ligands for an antibody.

[0188] C. Visualization Techniques

[0189] A number of techniques for visualizing or detecting labeled nucleic acids are readily available. Such techniques include, microscopy, arrays, Fluorometry, Light cyclers or other real time PCR machines, FACS analysis, scintillation counters, Phosphoimagers, Geiger counters, MRI, CAT, antibody-based detection methods (Westerns, immunofluorescence, immunohistochemistry), histochemical techniques, HPLC (Griffey et al., 1997), spectroscopy, capillary gel electrophoresis (Cummins et al., 1996), spectroscopy; mass spectroscopy; radiological techniques; and mass balance techniques.

[0190] When two or more differentially colored labels are employed, fluorescent resonance energy transfer (FRET) techniques may be employed to characterize association of one or more nucleic acid. Furthermore, a person of ordinary skill in the art is well aware of ways of visualizing, identifying, and characterizing labeled nucleic acids, and accordingly, such protocols may be used as part of the invention. Examples of tools that may be used also include fluorescent microscopy, a BioAnalyzer, a plate reader, Storm (Molecular Dynamics), Array Scanner, FACS (fluorescent activated cell sorter), or any instrument that has the ability to excite and detect a fluorescent molecule.

### III. Array Preparation and Screening

[0191] Nucleic acids of the invention include one or more nucleic acid comprising at least one segment having a sequence or complementary sequence of one or more of the miRNA sequences described herein. Nucleic acid probes of the invention are typically coupled to a support. Such supports are well known to those of ordinary skill in the art and include, but are not limited to glass, plastic, metal, or latex. In particular aspects of the invention, the support can be planar or in the form of a bead or other geometric shapes or configurations.

[0192] A. Array Preparation

[0193] Certain embodiments of the present invention concerns the preparation and use of mRNA or nucleic acid arrays, miRNA or nucleic acid arrays, and/or miRNA or nucleic acid probe arrays, which are macroarrays or microarrays of nucleic acid molecules (probes) that are fully or nearly complementary (over the length of the prove) or identical (over the length of the prove) to a plurality of nucleic acid, mRNA or miRNA molecules, precursor miRNA molecules, or nucleic acids derived from the various genes and gene pathways modulated by miR-10 miRNAs and that are positioned on a support or support material in a spatially separated organization. Macroarrays are typically sheets of nitrocellulose or nylon upon which probes have been spotted. Microarrays position the nucleic acid probes more densely such that up to 10,000 nucleic acid molecules can be fit into a region typically 1 to 4 square centimeters. Microarrays can be fabricated by spotting nucleic acid molecules, e.g., genes, oligonucleotides, etc., onto substrates or fabricating oligonucleotide sequences in situ on a substrate. Spotted or fabricated nucleic acid molecules can be applied in a high density matrix pattern of up to about 30 non-identical nucleic acid molecules per square centimeter or higher, e.g. up to about 100 or even 1000 per square centimeter. Microarrays typically use coated glass as the solid support, in contrast to the nitrocellulose-based material of filter arrays. By having an ordered array of marker RNA and/or miRNA-complementing nucleic acid samples, the position of each sample can be tracked and linked to the original sample.

[0194] A variety of different array devices in which a plurality of distinct nucleic acid probes are stably associated with the surface of a solid support are known to those of skill in the art. Useful substrates for arrays include nylon, glass, metal, plastic, latex, and silicon. Such arrays may vary in a number of different ways, including average probe length, sequence or types of probes, nature of bond between the probe and the array surface, e.g. covalent or non-covalent, and the like. The labeling and screening methods of the present invention and the arrays are not limited in its utility with respect to any parameter except that the probes detect miRNA, or genes or nucleic acid representative of genes; consequently, methods and compositions may be used with a variety of different types of nucleic acid arrays.

[0195] miRNA arrays or miRNA probe arrays are ordered macroarrays or microarrays of nucleic acid molecules (probes) that are fully or nearly complementary or identical to a plurality of miRNA molecules, precursor miRNA molecules, or segments thereof and that are positioned on a support or support material in a spatially separated organization. Representative methods and apparatus for preparing a microarray have been described, for example, in U.S. Pat. Nos. 5,143,854; 5,202,231; 5,242,974; 5,288,644; 5,324,633; 5,384,261; 5,405,783; 5,412,087; 5,424,186; 5,429,807; 5,432,049; 5,436,327; 5,445,934; 5,468,613; 5,470,710; 5,472,672; 5,492,806; 5,525,464; 5,503,980; 5,510,270; 5,525,464; 5,527,681; 5,529,756; 5,532,128; 5,545,531; 5,547,839; 5,554,501; 5,556,752; 5,561,071; 5,571,639; 5,580,726; 5,580,732; 5,593,839; 5,599,695; 5,599,672; 5,610,287; 5,624,711; 5,631,134; 5,639,603; 5,654,413; 5,658,734; 5,661,028; 5,665,547; 5,667,972; 5,695,940; 5,700,637; 5,744,305; 5,800,992; 5,807,522; 5,830,645; 5,837,196; 5,871,928; 5,847,219; 5,876,932; 5,919,626; 6,004,755; 6,087,102; 6,368,799; 6,383,749; 6,617,112; 6,638,717; 6,720,138, as well as WO 93/17126; WO 95/11995; WO 95/21265; WO 95/21944; WO 95/35505; WO 96/31622; WO 97/10365; WO 97/27317; WO 99/35505; WO 09923256; WO 09936760; WO0138580; WO 0168255; WO 03020898; WO 03040410; WO 03053586; WO 03087297; WO 03091426; WO03100012; WO 04020085; WO 04027093; EP 373 203; EP 785 280; EP 799 897 and UK 8 803 000; the disclosures of which are all herein incorporated by reference.

[0196] It is contemplated that the arrays contain 2, 20, 25, 50, 80, 100 or more different probes. It is contemplated that they may contain 1000, 16,000, 65,000, 250,000 or 1,000,000 or more different probes. The probes can be directed to targets in one or more different organisms or cell types. The oligonucleotide probes range from 5 to 50, 5 to 45, 10 to 40, 9 to 34, or 15 to 40 nucleotides in length in some embodiments. In certain embodiments, the oligonucleotide probes are 5, 10, 15, 20 to 20, 25, 30, 35, 40 nucleotides in length including all integers and ranges there between.

[0197] The location and sequence of each different probe sequence in the array are generally known. Moreover, the large number of different probes can occupy a relatively small area providing a high density array having a probe density of generally greater than about 60, 100, 600, 1000, 5,000, 10,000, 40,000, 100,000, or 400,000 different oligonucleotide probes per cm². The surface area of the array can be about or less than about 1, 1.6, 2, 3, 4, 5, 6, 7, 8, 9, or 10 cm².

[0198] Moreover, a person of ordinary skill in the art could readily analyze data generated using an array. Such protocols are disclosed above, and include information found in WO 9743450; WO 03023058; WO 03022421; WO 03029485; WO 03067217; WO 03066906; WO 03076928; WO 03093810; WO 03100448A1, all of which are specifically incorporated by reference.

[0199] B. Sample Preparation

[0200] It is contemplated that the miRNA of a wide variety of samples can be analyzed using the arrays, index of miRNA probes, or array technology of the invention. Samples may be biological samples, in which case, they can be from biopsy, fine needle aspirates, exfoliates, blood, tissue, organs, semen, saliva, tears, other bodily fluid, hair follicles, skin, lymph nodes (e.g., sentinel, proximal to a disease site, or distal to a disease site) or any sample containing or constituting biological cells. In certain aspects samples may be, but are nt limted to biopsy or cells purified or enriched to some extent from a biopsy or other bodily fluids or tissues. In certain embodiments, samples may be, but are not limited to, fresh, frozen, fixed, formalin fixed, paraffin embedded, or formalin fixed and paraffin embedded. Alternatively, the sample may not be a biological sample, but be a chemical mixture, such as a cell-free reaction mixture (which may contain one or more biological enzymes). While assessment of endogenous miRNA is contemplated in the methods described herein, recombinant or synthetic miRNA may also be used in various aspects of the invention—including therapy or as standards or references.

[0201] C. Hybridization

[0202] After an array or a set of miRNA probes is prepared and the miRNA in the sample is labeled, the population of target nucleic acids is contacted with the array or probes under hybridization conditions, where such conditions can be adjusted, as desired, to provide for an optimum level of specificity in view of the particular assay being performed. Suitable hybridization conditions are well known to those of skill in the art and reviewed in Sambrook et al. (2001) and WO 95/21944. Of particular interest in many embodiments is the use of stringent conditions during hybridization. Stringent conditions are known to those of skill in the art.

[0203] It is specifically contemplated that a single array or set of probes may be contacted with multiple samples. The samples may be labeled with different labels to distinguish the samples. For example, a single array can be contacted with a tumor tissue sample labeled with Cy3, and normal tissue sample labeled with Cy5. Differences between the samples for particular miRNAs corresponding to probes on the array can be readily ascertained and quantified.

[0204] The small surface area of the array permits uniform hybridization conditions, such as temperature regulation and salt content. Moreover, because of the small area occupied by the high density arrays, hybridization may be carried out in extremely small fluid volumes (e.g., about 250 μl or less, including volumes of about or less than about 5, 10, 25, 50, 60, 70, 80, 90, 100 μl, or any range derivable therein). In small volumes, hybridization may proceed very rapidly.

[0205] D. Differential Expression Analyses

[0206] Arrays of the invention can be used to detect differences between two samples. Specifically contemplated applications include identifying and/or quantifying differences between miRNA from a sample that is normal and from a sample that is not normal, between a cancerous condition and a non-cancerous condition, or between two differently treated samples. Also, miRNA may be compared between a sample believed to be susceptible to a particular disease or condition and one believed to be not susceptible or resistant to that disease or condition. A sample that is not normal is one exhibiting phenotypic trait(s) of a disease or condition or one believed to be not normal with respect to that disease or condition. It may be compared to a cell that is normal with respect to that disease or condition. Phenotypic traits include symptoms of, or susceptibility to, a disease or condition of which a component is or may or may not be genetic or caused by a hyperproliferative or neoplastic cell or cells.

[0207] An array comprises a solid support with nucleic acid probes attached to the support. Arrays typically comprise a plurality of different nucleic acid probes that are coupled to a surface of a substrate in different, known locations. These arrays, also described as “microarrays” or colloquially “chips” have been generally described in the art, for example, U.S. Pat. Nos. 5,143,854, 5,445,934, 5,744,305, 5,677,195, 6,040,193, 5,424,186 and Fodor et al., 1991), each of which is incorporated by reference in its entirety for all purposes. Techniques for the synthesis of these arrays using mechanical synthesis methods are described in, e.g., U.S. Pat. No. 5,384,261, incorporated herein by reference in its entirety for all purposes. Although a planar array surface is used in certain aspects, the array may be fabricated on a surface of virtually any shape or even a multiplicity of surfaces. Arrays may be nucleic acids on beads, gels, polymeric surfaces, fibers such as fiber optics, glass or any other appropriate substrate, see U.S. Pat. Nos. 5,770,358, 5,789,162, 5,708,153, 6,040,193 and 5,800,992, which are hereby incorporated in their entirety for all purposes.

[0208] Tissues and/or corresponding cancer cells that may be evaluated by methods and compositions of the invention include bladder, blood, bone, bone marrow, brain, breast, colon, esophagus, gastrointestine, gum, head, kidney, liver, lung, lymph node, nasopharynx, neck, ovary, pancreas, prostate, skin, small intesting, spleen, stomach, testis, thymus, thyroid, tongue, trachea, or uterus. Moreover, miRNA can be evaluated in precancers, such as metaplasia, dysplasia, and hyperplasia. The methods of the invention can detect metastasis and can be used in detecting, prognosing, and/or staging a patient's disease. It is specifically contemplated that the invention can be used to evaluate differences between stages of disease, such as between hyperplasia, neoplasia, pre-cancer and cancer, or between a primary tumor and a metastasized tumor.

[0209] In certain embodiments, miRNA profiles may be generated to evaluate and correlate those profiles with pharmacokinetics. For example, miRNA profiles may be created and evaluated for patient tumor and blood samples prior to the patient's being treated or during treatment to determine if there are miRNAs whose expression correlates with the outcome of treatment. Identification of differential miRNAs can lead to a prognostic and/or diagnostic assay that can be used to evaluate tumor and/or blood samples to determine what drug regimen the patient should be provided. In addition, it can be used to identify or select patients suitable for a particular clinical trial. If a miRNA profile is determined to be correlated with drug efficacy or drug toxicity that may be relevant to whether that patient is an appropriate patient for receiving the drug or for a particular dosage of the drug.

[0210] In addition to the above prognostic assay, blood samples from patients with a variety of diseases can be evaluated to determine if different diseases can be identified based on blood miRNA levels. A diagnostic assay can be created based on the profiles that doctors can use to identify individuals with a disease or who are at risk to develop a disease or experience a recurrence of disease.

[0211] E. Other Assays

[0212] In addition to the use of arrays and microarrays, it is contemplated that a number of difference assays could be employed to analyze miRNAs, their activities, and their effects. Such assays include, but are not limited to, nucleic amplification, polymerase chain reaction, quantitative PCR, RT-PCR, in situ hybridization, Northern hybridization, hybridization protection assay (HPA)(GenProbe), branched DNA (bDNA) assay (Chiron), rolling circle amplification (RCA), single molecule hybridization detection (US Genomics), Invader assay (ThirdWave Technologies), and/or Bridge Litigation Assay (Genaco).

### IV. Kits

[0213] Any of the compositions described herein may be comprised in a kit. In a non-limiting example, reagents for isolating miRNA, labeling miRNA, and/or evaluating a miRNA population using an array, nucleic acid amplification, and/or hybridization can be included in a kit, as well reagents for preparation of samples from patient samples. The kit may further include miRNA, miRNA probes, or reagents for creating or synthesizing miRNA probes. The kits will thus comprise, in suitable container means, an enzyme for labeling the miRNA by incorporating labeled nucleotide or unlabeled nucleotides that are subsequently labeled. In certain aspects, the kit can include amplification reagents. In other aspects, the kit may include various supports, such as glass, nylon, polymeric beads, and the like, having probes coupled there to and/or reagents for coupling any probes and/or target nucleic acids. It may also include one or more buffers, such as reaction buffer, labeling buffer, washing buffer, or a hybridization buffer, compounds for preparing the miRNA probes, and components for isolating miRNA. Other kits of the invention may include components for making a nucleic acid array comprising miRNA.

[0214] Kits for implementing methods of the invention described herein are specifically contemplated. In some embodiments, there are kits for preparing miRNA for multi-labeling and kits for preparing miRNA probes and/or miRNA arrays. In these embodiments, kit comprise, in suitable container means, 1, 2, 3, 4, 5, 6, 7, 8, 9, 10, 11, 12 or more of the following: (1) poly(A) polymerase; (2) unmodified nucleotides (G, A, T, C, and/or U); (3) a modified nucleotide (labeled or unlabeled); (4) poly(A) polymerase buffer; and, (5) at least one microfilter; (6) label that can be attached to a nucleotide; (7) at least one miRNA probe; (8) reaction buffer; (9) a miRNA array or components for making such an array; (10) acetic acid; (11) alcohol; and/or (12) solutions for preparing, isolating, enriching, and purifying miRNAs or miRNA probes or arrays. Other reagents include those generally used for manipulating RNA, such as formamide, loading dye, ribonuclease inhibitors, and DNase.

[0215] In specific embodiments, kits of the invention include an array containing miRNA probes, as described in the application. An array may have probes corresponding to all known miRNAs of an organism or a particular tissue or organ in particular conditions, or to a subset of such probes. The subset of probes on arrays of the invention may be or include those identified as relevant to a particular diagnostic, therapeutic, prognostic or staging application. For example, the array may contain one or more probes that is indicative or suggestive of (1) a disease or condition, (2) susceptibility or resistance to a particular drug or treatment; (3) susceptibility to toxicity from a drug or substance; (4) the stage of development or severity of a disease or condition (prognosis); and (5) genetic predisposition to a disease or condition, or combinations thereof.

[0216] For any kit embodiment, including an array, there can be nucleic acid molecules that contain or can be used to amplify a sequence that is a variant of, identical to or complementary to all or part of any of miRNA described or named herein. In certain embodiments, a kit or array of the invention can contain one or more probes for the miRNAs identified. Any nucleic acid discussed above may be implemented as part of a kit.

[0217] The components of the kits may be packaged either in aqueous media or in lyophilized form. The container means of the kits will generally include at least one vial, test tube, flask, bottle, syringe or other container means, into which a component may be placed, and preferably, suitably aliquoted. Where there is more than one component in the kit (labeling reagent and label may be packaged together), the kit also will generally contain a second, third or other additional container into which the additional components may be separately placed. However, various combinations of components may be comprised in a vial.

[0218] When the components of the kit are provided in one and/or more liquid solutions, the liquid solution is an aqueous solution, with a sterile aqueous solution being particularly preferred.

[0219] However, the components of the kit may be provided as dried or lyophilized powder(s). When reagents and/or components are provided as a dry powder, the powder can be reconstituted by the addition of a suitable solvent. It is envisioned that the solvent may also be provided in another container means. In some embodiments, labeling dyes are provided as a dried power. It is contemplated that 10, 20, 30, 40, 50, 60, 70, 80, 90, 100, 120, 120, 130, 140, 150, 160, 170, 180, 190, 200, 300, 400, 500, 600, 700, 800, 900, 1000 μg or at least or at most those amounts of dried dye are provided in kits of the invention. The dye may then be resuspended in any suitable solvent, such as DMSO.

[0220] The container means will generally include at least one vial, test tube, flask, bottle, syringe and/or other container means, into which the nucleic acid formulations are placed, preferably, suitably allocated. The kits may also comprise a second container means for containing a sterile, pharmaceutically acceptable buffer and/or other diluent.

[0221] The kits of the present invention will also typically include a means for containing the vials in close confinement for commercial sale, such as, e.g., injection and/or blow-molded plastic containers into which the desired vials are retained.

[0222] Such kits may also include components that facilitate isolation of the labeled miRNA. It may also include components that preserve or maintain the miRNA or that protect against its degradation. Such components may be RNAse-free or protect against RNAses. Such kits generally will comprise, in suitable means, distinct containers for each individual reagent or solution.

[0223] A kit will also include instructions for employing the kit components as well the use of any other reagent not included in the kit. Instructions may include variations that can be implemented.

[0224] Kits of the invention may also include one or more of the following: Control RNA; nuclease-free water; RNase-free containers, such as 1.5 ml tubes; RNase-free elution tubes; PEG or dextran; ethanol; acetic acid; sodium acetate; ammonium acetate; guanidinium; detergent; nucleic acid size marker; RNase-free tube tips; and RNase or DNase inhibitors.

[0225] It is contemplated that such reagents are embodiments of kits of the invention. Such kits, however, are not limited to the particular items identified above and may include any reagent used for the manipulation or characterization of miRNA.

### V. EXAMPLES

[0226] The following examples are given for the purpose of illustrating various embodiments of the invention and are not meant to limit the present invention in any fashion. One skilled in the art will appreciate readily that the present invention is well adapted to carry out the objects and obtain the ends and advantages mentioned, as well as those objects, ends and advantages inherent herein. The present examples, along with the methods described herein are presently representative of preferred embodiments, are exemplary, and are not intended as limitations on the scope of the invention. Changes therein and other uses which are encompassed within the spirit of the invention as defined by the scope of the claims will occur to those skilled in the art.

### Example 1

### Cervix Tissue Samples and RNA from Cervical Specimens

[0227] Total RNA, purified from four separate normal human cervixes (NCX), was purchased from Ambion (FirstChoice® Human Cervix Total RNA, cat. no. AM6992; Ambion, Austin, Tex., USA;) (Table 1). Nine, separate squamous cell carcinoma, frozen tissue samples (TUM) collected from human uterine cervixes were purchased from ProteoGenex (ProteoGenex, Inc.; Culver City, Calif., USA) (Table 2). Total RNA isolation from the TUM tissue samples was performed using the mirVana™ miRNA Isolation Kit (Ambion; cat. no. AM1560), following the manufacturer's protocol.

TABLE 1
Patient information for normal cervix (NCX) tissue samples.

| | Patient | Patient | HPV16/18 |
|---|---|---|---|
| Sample | Age | Ethnicity | Status |
| NCX3 | 72 | Caucasian | Negative |
| NCX10 | 56 | Caucasian | Negative |
| NCX13 | 57 | Caucasian | Negative |
| NCX17 | 53 | Caucasian | N/A |

HPV, human papillomavirus

TABLE 2
Patient and tissue sample pathology information for nine squamous cell carcinoma
tissue samples (TUM) from human uterine cervixes.
Histological Diagnosis refers to diagnosis of the cervix tissue sample.

| | | | | TNM | |
|---|---|---|---|---|---|
| | | | | Stage | |
| | Age | Patient | | (Sobin and | HPV16/18 |
| Sample | (yr) | Ethnicity | Histological Diagnosis | Wittekind, 2002) | Status |
| TUM1 | 52 | Caucasian | SCC | T1N1M0 | 16 |
| TUM2 | 32 | Caucasian | SCC, poorly differentiated | T1bN0M0 | 18 |
| TUM3 | 47 | Caucasian | Non-keratinizing SCC | T1aN1M0 | 16 |
| TUM4 | 45 | Caucasian | SCC, moderately differentiated | T1aN1M0 | 16 |
| TUM5 | 29 | Caucasian | SCC, poorly differentiated | T1a2N0M0 | 18 |
| TUM6 | 55 | Caucasian | SCC, moderately differentiated | T3aN1M0 | Negative |
| TUM7 | 40 | Caucasian | SCC, moderately differentiated | T2aN1M0 | 16 + 18 |
| TUM8 | 44 | Caucasian | SCC, well to poorly differentiated | T1a2N0M0 | 16 |
| TUM9 | 39 | Caucasian | SCC, poorly differentiated | T3aN0M0 | 18 |

SCC, squamous cell carcinoma;
HPV, human papillomavirus

[0228] In addition, formalin-fixed, paraffin-embedded (FFPE) tissue samples, prepared from four cancer-positive and four cancer-negative inguinal lymph nodes from eight different cervical cancer patients, were purchased from ProteoGenex (Table 3). All tissue samples were less than 2 years old. A hematoxilin-eosin (H&E)-stained slide from each sample was reviewed by a pathologist at Asuragen to confirm lymph node statuses as cancer cell-positive (LNpos) or cancer cell-negative (LNneg).

TABLE 3
Patient and tissue sample pathology information for inguinal lymph nodes (LN) from
cervical cancer patients. LNs from four patients were cancer cell-positive (LNpos),
and LNs from four patients were cancer cell-negative (LNneg).

| Sample | Age (yr) | Cancer | Cervix Tumor | | AJCC | |
|---|---|---|---|---|---|---|
| ID | Ethnicity | Diagnosis | Histological Diagnosis | TNM Stage | Stage | LN Mets |
| LNpos1 | 36 Caucasian | metastatic | SCC moderately to poorly differentiated | T1b1N1M0 | IIIB | 3/6 |
| LNpos2 | 47 Caucasian | metastatic | SCC poorly differentiated | T1b1N1M0 | IIIB | 3/3 |
| LNpos3 | 54 Caucasian | metastatic | SCC moderately to poorly differentiated | T1b1N1M0 | IIIB | 3/5 |
| LNpos4 | 34 Caucasian | metastatic | SCC moderately differentiated | T1b1N1M0 | IIIB | 3/5 |
| LNneg1 | 40 Caucasian | Normal | SCC moderately differentiated | T1b1N0M0 | IB1 | 0/6 |
| LNneg2 | 52 Caucasian | Normal | SCC moderately differentiated | T1b1N0M0 | IB1 | 0/3 |
| LNneg3 | 39 Caucasian | Normal | SCC moderately differentiated | T1b1N0M0 | IB1 | 0/9 |
| LNneg4 | 56 Caucasian | Normal | SCC moderately differentiated | T2aN0M0 | IIA | 0/10 |

SCC, squamous cell carcinoma;
TNM stage (Sobin and Wittekind, 2002);
AJCC Stage (Greene, 2002).

[0229] Total RNA was extracted from FFPE tissue samples using a RecoverAll™ kit (Ambion; RecoverAll™ Total Nucleic Acid Isolation Kit for FFPE, cat no.AM1975), using the manufacturer's protocol as modified in Doleshal et al.). Purified total RNA was quantified using a Nanodrop® ND-1000 (Nanoprop Technologies, Wilmington, Del., USA).

### Example 2

### miRNAs Differentally Expressed Between Normal Cervix Tissue and Cancer-negative Inguinal Lymph Nodes

[0230] To identify miRNAs that may be useful markers for metastasis of cervical cancer to inguinal lymph nodes, miRNAs were identified that are expressed at significantly higher levels in normal cervix tissue than in cancer-negative inguinal lymph nodes.

[0231] miRNA expression was determined for four normal cervix tissue samples (NCX3, NCX10, NCX13, NCX17— described in Example 1, Table 1 above) and four cancer-negative lymph nodes (LNneg1-4—described in Example 1, Table 3 above). For each tissue sample, microRNA-containing fractions were purified from 10 μg of total RNA using a flashPAGE™ Fractionation Apparatus (Ambion). Purified small RNAs were enzymatically biotinylated at their 3′-termini and hybridized to a custom-made microRNA array (miRChip V1.0, manufactured by Affymetrix, Santa Clara, Calif., USA for Ambion) by DiscovArray™ miRNA Expression Service (Asuragen). The miRChip V1.0 contains probes for more than 13,000 verified and candidate miRNAs from a number of sources including Sanger miRBase v9.2 database (Griffiths-Jones et al., 2006) and published reports (Bentwich et al., 2005; Berezikov et al., 2005; Xie et al., 2005; Cummins et al., 2006). Hybridization, washing, staining, imaging, and signal extraction were performed as recommended by the miRChip manufacturer, except that the 20× GeneChip® Eukaryotic Hybridization Control cocktail was omitted.

[0232] Signal processing with the miRChip is a multi-step process involving probe-specific signal detection calls, background estimate and correction, constant variance stabilization and either array scaling or global normalization. For an overview of miRNA processing and analysis see Davison et al., (2006).

[0233] Probe specific signal detection calls. Each probe on an array is assayed for detection based on a Wilcoxon rank-sum test of the miRNA probe signal compared to the distribution of signals from GC-content-matched, anti-genomic probes. If the resulting p-value for the probes is ≦0.06 then it is considered “detected above background.” Probes with p-values >0.06 have insufficient signal to discriminate from the background and are thus considered not detected.

[0234] Background estimate and correction. The same set of anti-genomic probes used to determine detection calls are used to estimate GC-content-matched background signals. Each miRNA probe signal has a GC-content-matched background estimate subtracted from its value. This GC-specific background contribution is estimated by the median signal from the distribution of GC-matched, anti-genomic probes.

[0235] Constant variance stabilization. Probes with low signal often exhibit a high degree of variability once transformed into logarithmic scales. To stabilize this low signal variability, the inventors add a constant value of 16 to the background corrected signal, a technique commonly performed on microarray data and the recommended data preprocessing method by Affymetrix and Illumina in the MicroArray Quality Control (MAQC) project (MAQC Consortium, 2006).

[0236] Normalization. The data were normalized with the VSN method (Huber et al., 2002). VSN is a global normalization process that stabilizes the variance evenly across the entire range of expression. Differences in VSN-transformed expression between samples are denoted by “log 2Diff” and can be transformed to a generalized fold change via exponentiation base 2. These values will exhibit a compression for small differences in expression.

[0237] A total of 269 miRNAs (130 verified, 139 predicted) exhibited significant differential expression between normal cervix (NCX) samples and cancer-negative inguinal lymph nodes (LNneg), (t-test (LNneg vs NCX)<0.05 and log 2Diff (LNneg vs NCX)≦−1 (Table 4). Among the verified miRNAs, the average expression levels of six miRNAs (hsa-miR-205, -368, -203, -495, -375, and -487b) were at least 100-fold less in LNneg samples than in NCX samples; the average expression levels of ten miRNAs (hsa-miR-200a, -299-5p, -493-5p, -200b, -133b, -187, -133a, -200c, -411, and -127) were between 50- and 100-fold lower in LNneg samples; the average expression levels of 32 miRNAs were between 10- and 50-fold lower in LNneg samples; and the average expression levels of 23 miRNAs were between 5- and 10-fold lower in LNneg samples than in NCX samples. Among the predicted miRNAs, the average expression levels of three miRNAs (hsa-asg-5021_st1, -13254_st1, and -9696_st1) were at least 50-fold lower in LNneg samples than in NCX samples; the average expression levels of fourteen miRNAs were between 10- and 50-fold lower in LNneg samples; and the average expression levels of 31 miRNAs were between 5- and 10-fold lower in LNneg samples than in NCX samples.

TABLE 4
MicroRNAs Differentially Expressed Between Normal Cervix Tissue Samples (NCX) and
Cancer-Negative Inguinal Lymph Node Samples (LNneg).

| | | NCX | | | | | | | LNneg | |
|---|---|---|---|---|---|---|---|---|---|---|
| Micro RNA | Probe ID | 17 | 10 | 3 | 16 | Mean | SD | % | 1 | 2 |
| hsa-miR-205 | hsa-miR-205_st1 | 12.8 | 8.63 | 12.99 | 12.18 | 11.67 | 2.05 | 100 | 3.61 | 2.06 |
| hsa-miR-368 | hsa-miR-368_st2 | 11.2 | 11.6 | 11.37 | 11.34 | 11.39 | 0.15 | 100 | 4.35 | 4.22 |
| hsa-miR-203 | hsa-miR-203_st2 | 13.0 | 10.0 | 13.19 | 11.66 | 11.97 | 1.47 | 100 | 4.94 | 5.50 |
| hsa-miR-495 | hsa-miR-495_st1 | 10.3 | 9.78 | 10.20 | 10.14 | 10.11 | 0.23 | 100 | 3.22 | 2.72 |
| hsa-miR-375 | hsa-miR-375_st1 | 11.3 | 9.64 | 10.75 | 10.08 | 10.46 | 0.76 | 100 | 3.34 | 4.72 |
| hsa-miR-487b | hsa-miR-487b_st2 | 10.9 | 9.84 | 10.36 | 10.91 | 10.52 | 0.53 | 100 | 4.55 | 4.06 |
| hsa-asg-5021 | hsa-asg-5021_st1 | 10.3 | 9.58 | 9.47 | 10.23 | 9.91 | 0.44 | 100 | 4.04 | 3.24 |
| hsa-miR-200a | hsa-miR-200a_st2 | 11.2 | 11.4 | 10.47 | 10.21 | 10.84 | 0.60 | 100 | 4.99 | 5.73 |
| hsa-miR-299-5p | hsa-miR-299-5p_st2 | 9.8 | 9.74 | 9.53 | 9.62 | 9.69 | 0.15 | 100 | 4.04 | 3.47 |
| hsa-miR-493-5p | hsa-miR-493-5p_st1 | 9.3 | 9.62 | 9.44 | 9.70 | 9.54 | 0.15 | 100 | 3.34 | 4.14 |
| hsa-asg-13254 | hsa-asg-13254_st1 | 10.3 | 9.59 | 9.35 | 10.23 | 9.87 | 0.48 | 100 | 4.45 | 3.47 |
| hsa-miR-200b | hsa-miR-200b_st1 | 12.9 | 13.0 | 12.65 | 11.92 | 12.63 | 0.50 | 100 | 6.68 | 7.72 |
| hsa-miR-133b | hsa-miR-133b_st2 | 8.6 | 11.2 | 10.91 | 10.49 | 10.33 | 1.14 | 100 | 4.00 | 4.75 |
| hsa-miR-187 | hsa-miR-187_st1 | 8.9 | 9.31 | 8.58 | 8.08 | 8.72 | 0.53 | 100 | 2.32 | 3.93 |
| hsa-miR-133a | hsa-miR-133a_st1 | 9.4 | 11.8 | 11.51 | 11.15 | 11.00 | 1.06 | 100 | 4.58 | 6.16 |
| hsa-miR-200c | hsa-miR-200c_st1 | 13.5 | 13.2 | 13.17 | 12.63 | 13.15 | 0.39 | 100 | 7.89 | 8.26 |
| hsa-miR-411 | hsa-miR-411_st1 | 9.1 | 8.61 | 8.51 | 8.55 | 8.70 | 0.28 | 100 | 3.40 | 2.72 |
| hsa-asg-9696 | hsa-asg-9696_st1 | 10.5 | 11.1 | 10.78 | 10.90 | 10.85 | 0.24 | 100 | 6.76 | 5.90 |
| hsa-miR-127 | hsa-miR-127_st1 | 11.6 | 11.2 | 10.89 | 11.77 | 11.40 | 0.39 | 100 | 6.07 | 5.95 |
| hsa-miR-432 | hsa-miR-432_st2 | 9.8 | 8.95 | 9.03 | 9.98 | 9.45 | 0.54 | 100 | 4.08 | 3.68 |
| hsa-miR-424 | hsa-miR-424_st1 | 9.7 | 10.2 | 9.93 | 9.47 | 9.83 | 0.31 | 100 | 5.04 | 5.70 |
| hsa-asg-14153 | hsa-asg-14153_st2 | 8.7 | 8.15 | 7.93 | 7.70 | 8.13 | 0.44 | 100 | 2.97 | 2.65 |
| hsa-miR-455 | hsa-miR-455_st1 | 8.5 | 8.65 | 10.11 | 8.97 | 9.06 | 0.73 | 100 | 2.65 | 5.19 |
| hsa-miR-503 | hsa-miR-503_st1 | 11.3 | 10.9 | 11.08 | 11.54 | 11.22 | 0.26 | 100 | 6.60 | 5.70 |
| hsa-miR-503 | hsa-miR141_st1 | 11.2 | 10.8 | 11.09 | 11.36 | 11.16 | 0.21 | 100 | 6.90 | 6.05 |
| hsa-asg-14176 | hsa-asg-14176_st1 | 9.0 | 9.48 | 9.71 | 8.86 | 9.26 | 0.40 | 100 | 4.76 | 5.47 |
| hsa-miR-154 | hsa-miR-154_st2 | 7.3 | 8.54 | 7.58 | 8.07 | 7.89 | 0.52 | 100 | 2.91 | 3.35 |
| hsa-miR-381 | hsa-miR-381_st2 | 7.4 | 8.10 | 7.78 | 7.83 | 7.78 | 0.28 | 100 | 3.81 | 2.19 |
| hsa-miR-409-3p | hsa-miR-409-3p_st1 | 8.5 | 7.37 | 7.47 | 8.23 | 7.91 | 0.58 | 100 | 3.34 | 2.79 |
| hsa-miR-199b | hsa-miR-199b_st2 | 11.3 | 11.6 | 11.61 | 11.04 | 11.41 | 0.29 | 100 | 6.16 | 7.61 |
| hsa-miR-134 | hsa-miR-134_st2 | 9.3 | 8.83 | 8.82 | 9.61 | 9.14 | 0.39 | 100 | 4.79 | 4.51 |
| hsa-miR-204 | hsa-miR-204_st2 | 9.1 | 10.1 | 9.70 | 9.85 | 9.71 | 0.45 | 100 | 5.15 | 6.57 |
| hsa-miR-376a | hsa-miR-376a_st2 | 8.9 | 7.92 | 8.29 | 8.12 | 8.32 | 0.46 | 100 | 3.67 | 3.97 |
| hsa-miR-376a | hsa-miR-376a_st2 | 8.9 | 7.92 | 8.29 | 8.12 | 8.32 | 0.46 | 100 | 3.67 | 3.97 |
| hsa-miR-376a | hsa-asg-14234_st1 | 8.3 | 7.12 | 7.22 | 7.17 | 7.47 | 0.59 | 100 | 3.45 | 4.14 |
| hsa-asg-7637 | hsa-asg-7637_st2 | 9.0 | 8.34 | 8.34 | 7.65 | 8.36 | 0.59 | 100 | 3.51 | 4.37 |
| hsa-miR-189 | hsa-miR-189_st1 | 8.3 | 8.65 | 8.24 | 8.47 | 8.43 | 0.17 | 100 | 3.81 | 4.70 |
| hsa-miR-429 | hsa-miR-429_st1 | 9.05 | 8.27 | 7.51 | 6.74 | 7.89 | 0.99 | 100 | 3.22 | 3.11 |
| hsa-miR-450 | hsa-miR-450_st2 | 6.92 | 7.82 | 7.82 | 8.19 | 7.69 | 0.54 | 100 | 3.10 | 3.58 |
| hsa-miR-450 | hsa-asg-14228_st2 | 5.3 | 7.20 | 7.32 | 7.54 | 6.86 | 1.00 | 100 | 2.84 | 3.78 |
| hsa-miR-1 | hsa-miR-1_st1 | 11.6 | 12.1 | 12.10 | 11.57 | 11.85 | 0.30 | 100 | 7.55 | 8.49 |
| hsa-miR-494 | hsa-miR-494_st1 | 10.6 | 9.49 | 9.36 | 10.04 | 9.87 | 0.57 | 100 | 5.33 | 5.47 |
| hsa-miR-494 | hsa-miR61_st2 | 9.4 | 8.67 | 8.54 | 9.22 | 8.97 | 0.44 | 100 | 5.51 | 5.36 |
| hsa-miR-369-5p | hsa-miR-369-5p_st2 | 7.2 | 7.19 | 6.82 | 7.98 | 7.32 | 0.48 | 100 | 2.71 | 3.11 |
| hsa-miR-369-5p | hsa-asg-1521_st1 | 7.0 | 6.46 | 5.79 | 7.31 | 6.65 | 0.68 | 75 | 3.22 | 3.24 |
| hsa-miR-132 | hsa-miR-132_st1 | 10.7 | 10.4 | 9.89 | 10.44 | 10.39 | 0.37 | 100 | 7.27 | 6.66 |
| hsa-asg-13097 | hsa-asg-13097_st1 | 7.8 | 7.89 | 7.57 | 8.43 | 7.93 | 0.36 | 100 | 3.67 | 3.58 |
| hsa-miR-379 | hsa-miR-379_st1 | 11.0 | 10.0 | 9.98 | 10.50 | 10.38 | 0.47 | 100 | 6.01 | 6.25 |
| hsa-miR-224 | hsa-miR-224_st2 | 10.9 | 10.4 | 10.87 | 11.41 | 10.90 | 0.41 | 100 | 7.29 | 8.21 |
| hsa-miR-224 | hsa-asg-14247_st1 | 11.1 | 10.5 | 10.93 | 11.58 | 11.05 | 0.42 | 100 | 7.41 | 8.28 |
| hsa-miR-196b | hsa-miR-196b_st2 | 10.6 | 11.4 | 10.91 | 10.91 | 10.97 | 0.33 | 100 | 7.11 | 8.02 |
| hsa-cand206 | hsa-cand206_st1 | 7.0 | 6.57 | 7.11 | 7.21 | 6.99 | 0.29 | 100 | 3.22 | 2.98 |
| hsa-miR-539 | hsa-miR-539_st1 | 6.6 | 6.06 | 6.24 | 7.58 | 6.64 | 0.68 | 100 | 2.71 | 2.45 |
| hsa-miR-539 | hsa-miR177_st1 | 5.6 | 6.07 | 6.26 | 6.79 | 6.18 | 0.49 | 50 | 2.71 | 3.68 |
| hsa-asg-5617 | hsa-asg-5617_st1 | 7.3 | 7.04 | 7.16 | 7.70 | 7.32 | 0.29 | 100 | 2.97 | 3.35 |
| hsa-miR-382 | hsa-miR-382_st1 | 9.6 | 9.68 | 10.26 | 10.69 | 10.07 | 0.50 | 100 | 6.24 | 6.05 |
| hsa-miR202 | hsa-miR202_st2 | 5.4 | 7.40 | 7.56 | 8.76 | 7.30 | 1.36 | 100 | 2.97 | 3.58 |
| hsa-miR-9* | hsa-miR-9-_st2 | 8.6 | 9.08 | 8.48 | 8.80 | 8.75 | 0.25 | 100 | 5.26 | 5.81 |
| hsa-miR-542-5p | hsa-miR-542-5p_st2 | 7.7 | 7.58 | 7.45 | 7.91 | 7.67 | 0.20 | 100 | 4.08 | 2.98 |
| hsa-asg-13404 | hsa-asg-13404_st2 | 5.0 | 7.01 | 7.25 | 8.68 | 6.99 | 1.50 | 75 | 3.72 | 2.72 |
| hsa-asg-13166 | hsa-asg-13166_st2 | 7.9 | 6.75 | 7.14 | 7.37 | 7.31 | 0.51 | 100 | 4.12 | 3.97 |
| hsa-miR-218 | hsa-miR-218_st2 | 11.3 | 11.3 | 10.99 | 11.17 | 11.22 | 0.18 | 100 | 8.04 | 8.18 |
| hsa-miR157 | hsa-miR157_st2 | 11.5 | 11.5 | 11.50 | 11.85 | 11.60 | 0.17 | 100 | 8.84 | 9.33 |
| hsa-miR-9 | hsa-miR-9_st2 | 6.4 | 8.35 | 6.98 | 6.84 | 7.15 | 0.83 | 100 | 3.77 | 3.78 |
| hsa-miR-9 | hsa-cand90_st2 | 5.3 | 7.12 | 5.55 | 5.99 | 6.00 | 0.79 | 75 | 2.97 | 3.35 |
| hsa-miR-329 | hsa-miR-329_st1 | 7.1 | 6.85 | 6.47 | 6.83 | 6.82 | 0.27 | 100 | 3.95 | 2.98 |
| hsa-miR-329 | hsa-asg-13589_st2 | 6.8 | 6.38 | 6.47 | 6.94 | 6.67 | 0.29 | 100 | 2.97 | 2.72 |
| hsa-miR-329 | hsa-asg-13204_st2 | 7.1 | 6.49 | 6.59 | 7.24 | 6.85 | 0.37 | 100 | 3.45 | 3.35 |
| hsa-miR-452 | hsa-miR-452_st1 | 8.9 | 8.51 | 8.24 | 8.82 | 8.62 | 0.31 | 100 | 5.64 | 5.36 |
| hsa-asg-562 | hsa-asg-562_st1 | 12.9 | 12.8 | 12.86 | 13.10 | 12.95 | 0.11 | 100 | 10.29 | 10.53 |
| hsa-miR-193b | hsa-miR-193b_st1 | 10.9 | 11.1 | 10.30 | 10.71 | 10.79 | 0.38 | 100 | 8.12 | 7.95 |
| hsa-asg-10883 | hsa-asg-10883_st1 | 9.1 | 10.3 | 9.28 | 8.88 | 9.43 | 0.66 | 100 | 6.15 | 7.10 |
| hsa-asg-9687 | hsa-asg-9687_st1 | 7.2 | 7.46 | 7.15 | 8.00 | 7.46 | 0.38 | 100 | 4.28 | 4.64 |
| hsa-miR-485-5p | hsa-miR-485-5p_st2 | 6.5 | 6.29 | 5.83 | 7.28 | 6.48 | 0.61 | 50 | 3.61 | 2.32 |
| hsa-miR-605 | hsa-miR-605_st1 | 6.6 | 6.12 | 5.76 | 5.79 | 6.07 | 0.40 | 100 | 2.25 | 2.85 |
| hsa-asg-14134 | hsa-asg-14134_st1 | 7.7 | 7.60 | 7.54 | 8.07 | 7.74 | 0.24 | 100 | 4.73 | 5.15 |
| hsa-asg-8411 | hsa-asg-8411_st2 | 6.52 | 7.56 | 7.04 | 7.70 | 7.20 | 0.54 | 100 | 3.56 | 4.57 |
| hsa-asg-13297 | hsa-asg-13297_st1 | 6.77 | 3.76 | 6.35 | 8.26 | 6.28 | 1.87 | 75 | 2.91 | 2.45 |
| hsa-asg-14230 | hsa-asg-14230_st1 | 6.6 | 6.66 | 6.94 | 6.93 | 6.80 | 0.16 | 100 | 3.56 | 4.06 |
| hsa-asg-13284 | hsa-asg-13284_st1 | 7.1 | 7.31 | 6.26 | 6.61 | 6.83 | 0.48 | 75 | 3.45 | 4.02 |
| hsa-miR-433 | hsa-miR-433_st2 | 7.0 | 6.42 | 5.98 | 7.53 | 6.74 | 0.68 | 75 | 3.72 | 2.85 |
| hsa-asg-7472 | hsa-asg-7472_st2 | 6.4 | 6.51 | 5.77 | 6.41 | 6.28 | 0.34 | 75 | 3.16 | 3.47 |
| hsa-miR-214 | hsa-miR-214_st1 | 11.4 | 12.0 | 11.74 | 12.29 | 11.89 | 0.36 | 100 | 8.90 | 9.43 |
| hsa-asg-10202 | hsa-asg-10202_st2 | 6.5 | 6.63 | 5.35 | 6.05 | 6.14 | 0.58 | 50 | 2.58 | 4.67 |
| hsa-miR-574 | hsa-miR-574_st1 | 10.8 | 11.6 | 11.13 | 11.42 | 11.27 | 0.36 | 100 | 8.40 | 9.16 |
| hsa-miR-487a | hsa-miR-487a_st2 | 6.2 | 6.06 | 6.33 | 6.27 | 6.24 | 0.12 | 100 | 3.45 | 3.47 |
| hsa-miR-487a | hsa-asg-6915_st1 | 7.2 | 6.17 | 6.93 | 6.63 | 6.73 | 0.44 | 100 | 4.12 | 4.44 |
| hsa-asg-14172 | hsa-asg-14172_st1 | 7.0 | 7.21 | 6.49 | 6.72 | 6.87 | 0.32 | 100 | 4.55 | 3.88 |
| hsa-asg-10131 | hsa-asg-10131_st2 | 5.8 | 6.45 | 6.29 | 5.79 | 6.10 | 0.32 | 100 | 2.71 | 3.24 |
| hsa-miR-485-3p | hsa-miR23_st2 | 7.2 | 6.48 | 6.45 | 7.07 | 6.82 | 0.41 | 100 | 3.61 | 4.06 |
| hsa-miR-485-3p | hsa-miR-485-3p_st2 | 6.8 | 6.16 | 6.35 | 6.96 | 6.58 | 0.38 | 100 | 3.91 | 4.37 |
| hsa-miR-27b | hsa-miR-27b_st1 | 13.6 | 13.8 | 13.84 | 13.50 | 13.71 | 0.16 | 100 | 11.25 | 11.47 |
| hsa-miR-183 | hsa-miR-183_st1 | 8.9 | 8.36 | 9.07 | 7.70 | 8.53 | 0.64 | 100 | 6.58 | 5.76 |
| hsa-miR-200a* | hsa-miR-200a-_st2 | 6.8 | 6.50 | 6.10 | 5.28 | 6.18 | 0.68 | 75 | 3.16 | 3.47 |
| hsa-miR-99b | hsa-miR-99b_st1 | 12.2 | 12.3 | 12.15 | 12.48 | 12.32 | 0.14 | 100 | 10.18 | 10.43 |
| hsa-miR-99b | hsa-asg-14196_st2 | 12.1 | 12.5 | 12.28 | 12.55 | 12.38 | 0.19 | 100 | 10.15 | 10.74 |
| hsa-miR-410 | hsa-miR-410_st1 | 6.1 | 4.93 | 5.79 | 6.61 | 5.88 | 0.71 | 50 | 3.56 | 2.98 |
| hsa-miR-497 | hsa-miR-497_st1 | 9.1 | 9.43 | 10.28 | 8.72 | 9.40 | 0.66 | 100 | 6.75 | 7.90 |
| hsa-miR-497 | hsa-miR43_st1 | 10.1 | 10.1 | 10.89 | 9.53 | 10.19 | 0.56 | 100 | 7.89 | 8.53 |
| hsa-miR154 | hsa-miR154_st1 | 7.4 | 6.90 | 6.93 | 7.23 | 7.13 | 0.28 | 100 | 4.42 | 5.01 |
| hsa-asg-1296 | hsa-asg-1296_st1 | 6.7 | 6.30 | 6.07 | 5.74 | 6.21 | 0.41 | 50 | 3.22 | 3.11 |
| hsa-miR-152 | hsa-miR-152_st1 | 12.9 | 12.6 | 12.47 | 12.78 | 12.71 | 0.19 | 100 | 10.29 | 10.97 |
| hsa-miR-299-3p | hsa-asg-10378_st1 | 6.1 | 5.13 | 6.53 | 6.05 | 5.96 | 0.59 | 75 | 2.78 | 3.24 |
| hsa-miR-299-3p | hsa-miR-299-3p_st2 | 5.8 | 5.47 | 5.76 | 5.89 | 5.74 | 0.19 | 25 | 3.67 | 2.98 |
| hsa-asg-7465 | hsa-asg-7465_st2 | 5.5 | 7.76 | 6.37 | 6.73 | 6.61 | 0.91 | 100 | 4.55 | 4.57 |
| hsa-miR-182 | hsa-miR-182_st1 | 10.9 | 10.1 | 10.35 | 9.42 | 10.21 | 0.63 | 100 | 8.42 | 8.10 |
| hsa-asg-9681 | hsa-asg-9681_st1 | 6.5 | 6.75 | 6.64 | 6.90 | 6.71 | 0.16 | 100 | 4.12 | 4.22 |
| hsa-asg-7471 | hsa-asg-7471_st1 | 8.0 | 8.50 | 8.15 | 8.02 | 8.19 | 0.21 | 100 | 5.32 | 5.84 |
| hsa-asg-11883 | hsa-asg-11883_st1 | 8.4 | 8.03 | 8.10 | 8.30 | 8.21 | 0.18 | 100 | 4.97 | 5.73 |
| hsa-asg-13205 | hsa-asg-13205_st1 | 7.9 | 7.98 | 7.89 | 7.77 | 7.89 | 0.09 | 100 | 5.24 | 5.76 |
| hsa-asg-14150 | hsa-asg-14150_st1 | 7.5 | 7.47 | 7.89 | 7.47 | 7.60 | 0.20 | 75 | 5.45 | 6.15 |
| hsa-cand247 | hsa-cand247_st1 | 5.4 | 6.49 | 5.99 | 5.21 | 5.79 | 0.57 | 75 | 3.34 | 2.98 |
| hsa-miR-654 | hsa-asg-33_st1 | 7.2 | 6.04 | 5.89 | 7.03 | 6.54 | 0.67 | 50 | 3.81 | 3.11 |
| hsa-miR-654 | hsa-miR-654_st1 | 6.9 | 5.75 | 5.45 | 7.01 | 6.30 | 0.81 | 50 | 3.86 | 4.57 |
| hsa-asg-2924 | hsa-asg-2924_st1 | 5.4 | 6.70 | 6.31 | 5.81 | 6.06 | 0.57 | 25 | 3.77 | 3.68 |
| hsa-asg-12227 | hsa-asg-12227_st1 | 6.0 | 5.42 | 4.58 | 4.39 | 5.10 | 0.75 | 25 | 2.91 | 2.32 |
| hsa-asg-10106 | hsa-asg-10106_st1 | 6.2 | 3.76 | 5.62 | 8.16 | 5.96 | 1.82 | 75 | 3.04 | 2.85 |
| hsa-miR-130a | hsa-cand144_st1 | 11.5 | 12.2 | 11.78 | 11.89 | 11.88 | 0.30 | 100 | 9.86 | 9.98 |
| hsa-miR-130a | hsa-miR-130a_st1 | 11.4 | 12.1 | 11.79 | 11.67 | 11.77 | 0.31 | 100 | 9.95 | 9.59 |
| hsa-miR-374 | hsa-miR-374_st2 | 6.2 | 7.29 | 6.82 | 7.06 | 6.85 | 0.44 | 100 | 4.84 | 4.44 |
| hsa-miR-199a | hsa-miR-199a_st2 | 11.0 | 12.4 | 11.62 | 11.48 | 11.64 | 0.59 | 100 | 10.04 | 10.07 |
| hsa-miR-370 | hsa-miR-370_st1 | 7.1 | 6.56 | 6.45 | 7.07 | 6.81 | 0.36 | 75 | 3.34 | 4.67 |
| hsa-miR-582 | hsa-miR-582_st1 | 4.2 | 6.95 | 6.98 | 6.73 | 6.24 | 1.31 | 75 | 3.67 | 4.91 |
| hsa-miR-365 | hsa-cand708_st1 | 6.3 | 6.57 | 5.94 | 7.17 | 6.52 | 0.51 | 100 | 4.28 | 4.64 |
| hsa-miR-365 | hsa-miR-365_st1 | 7.0 | 7.28 | 6.79 | 8.10 | 7.31 | 0.56 | 100 | 4.99 | 5.57 |
| hsa-miR-365 | hsa-asg-13156_st1 | 7.0 | 7.33 | 6.71 | 7.63 | 7.17 | 0.40 | 100 | 4.35 | 5.84 |
| hsa-miR-124a | hsa-miR-124a_st1 | 7.8 | 7.21 | 5.72 | 5.91 | 6.68 | 1.04 | 100 | 5.60 | 4.22 |
| hsa-miR-124a | hsa-cand79_st1 | 7.5 | 6.81 | 6.13 | 5.70 | 6.54 | 0.79 | 50 | 4.39 | 4.64 |
| hsa-asg-12964 | hsa-asg-12964_st2 | 4.7 | 5.65 | 5.37 | 6.10 | 5.46 | 0.59 | 25 | 2.25 | 3.47 |
| hsa-asg-279 | hsa-asg-279_st2 | 7.1 | 8.28 | 7.61 | 7.09 | 7.53 | 0.55 | 50 | 5.61 | 5.96 |
| hsa-asg-3822 | hsa-asg-3822_st2 | 5.4 | 5.42 | 4.89 | 4.86 | 5.15 | 0.32 | 25 | 3.04 | 2.98 |
| hsa-asg-11715 | hsa-asg-11715_st2 | 5.8 | 4.95 | 5.03 | 5.05 | 5.22 | 0.43 | 25 | 2.78 | 2.85 |
| hsa-asg-13304 | hsa-asg-13304_st2 | 7.9 | 8.47 | 8.05 | 7.57 | 8.02 | 0.37 | 100 | 6.04 | 6.50 |
| hsa-miR-184 | hsa-miR-184_st1 | 6.9 | 7.12 | 6.97 | 6.37 | 6.86 | 0.33 | 100 | 4.87 | 4.86 |
| hsa-miR-27a | hsa-miR-27a_st2 | 12.1 | 12.3 | 12.32 | 12.07 | 12.23 | 0.14 | 100 | 10.49 | 10.77 |
| hsa-asg-924 | hsa-asg-924_st1 | 7.6 | 6.22 | 7.13 | 5.70 | 6.67 | 0.86 | 50 | 5.04 | 3.78 |
| hsa-asg-3376 | hsa-asg-3376_st1 | 6.6 | 6.18 | 6.76 | 6.01 | 6.40 | 0.36 | 100 | 4.31 | 3.78 |
| hsa-miR-361 | hsa-miR-361_st2 | 12.2 | 12.7 | 12.65 | 12.74 | 12.60 | 0.24 | 100 | 10.69 | 11.37 |
| hsa-asg-14233 | hsa-asg-14233_st1 | 10.5 | 10.8 | 10.44 | 10.94 | 10.70 | 0.24 | 100 | 8.28 | 8.80 |
| hsa-asg-8174 | hsa-asg-8174_st1 | 5.7 | 6.00 | 5.76 | 5.15 | 5.66 | 0.36 | 75 | 2.91 | 3.35 |
| hsa-asg-2837 | hsa-asg-2837_st2 | 3.7 | 5.96 | 5.85 | 5.31 | 5.21 | 1.02 | 50 | 3.72 | 2.98 |
| hsa-asg-10674 | hsa-asg-10674_st1 | 7.3 | 7.61 | 6.93 | 7.35 | 7.32 | 0.28 | 100 | 4.76 | 4.75 |
| hsa-asg-14146 | hsa-asg-14146_st1 | 7.2 | 7.26 | 7.11 | 6.22 | 6.97 | 0.51 | 100 | 4.73 | 5.32 |
| hsa-miR-376b | hsa-miR-376b_st1 | 5.9 | 3.89 | 4.80 | 5.18 | 4.95 | 0.85 | 50 | 2.71 | 2.19 |
| hsa-miR-211 | hsa-miR-211_st1 | 7.1 | 5.35 | 3.47 | 6.15 | 5.52 | 1.54 | 50 | 3.72 | 3.47 |
| hsa-miR-154* | hsa-miR-154-_st2 | 7.0 | 6.29 | 6.53 | 6.52 | 6.60 | 0.32 | 100 | 4.67 | 5.36 |
| hsa-asg-259 | hsa-asg-259_st2 | 5.5 | 5.76 | 5.99 | 5.28 | 5.64 | 0.31 | 25 | 3.86 | 3.24 |
| hsa-asg-1596 | hsa-asg-1596_st2 | 6.2 | 6.04 | 5.95 | 5.50 | 5.93 | 0.31 | 25 | 4.24 | 3.24 |
| hsa-asg-13646 | hsa-asg-13646_st1 | 9.2 | 8.59 | 8.40 | 8.70 | 8.74 | 0.38 | 100 | 6.92 | 7.78 |
| hsa-asg-14175 | hsa-asg-14175_st1 | 6.5 | 6.87 | 6.62 | 7.38 | 6.85 | 0.39 | 100 | 4.49 | 5.70 |
| hsa-asg-4439 | hsa-asg-4439_st2 | 7.5 | 5.07 | 5.03 | 5.15 | 5.70 | 1.24 | 25 | 3.67 | 3.58 |
| hsa-miR-99a | hsa-miR-99a_st2 | 12.9 | 13.2 | 13.21 | 13.09 | 13.14 | 0.13 | 100 | 11.03 | 12.19 |
| hsa-miR-99a | hsa-cand160_st2 | 12.9 | 13.0 | 13.04 | 12.94 | 12.98 | 0.08 | 100 | 11.36 | 12.46 |
| hsa-miR-499 | hsa-miR-499_st1 | 4.6 | 6.82 | 5.66 | 6.36 | 5.87 | 0.95 | 50 | 3.22 | 5.15 |
| hsa-miR-499 | hsa-miR12_st1 | 5.5 | 7.24 | 5.31 | 5.99 | 6.02 | 0.86 | 75 | 3.77 | 4.86 |
| hsa-asg-3145 | hsa-asg-3145_st1 | 6.2 | 6.83 | 6.24 | 7.31 | 6.67 | 0.50 | 75 | 4.20 | 5.06 |
| hsa-miR-504 | hsa-miR-504_st1 | 5.5 | 6.43 | 5.25 | 5.84 | 5.77 | 0.50 | 25 | 3.86 | 3.47 |
| hsa-miR-489 | hsa-miR-489_st2 | 6.9 | 6.51 | 7.21 | 6.92 | 6.90 | 0.29 | 100 | 5.45 | 5.24 |
| hsa-asg-12139 | hsa-asg-12139_st2 | 5.7 | 4.98 | 4.68 | 5.01 | 5.11 | 0.46 | 25 | 2.97 | 3.35 |
| hsa-miR-149 | hsa-miR-149_st2 | 6.4 | 6.24 | 5.95 | 6.74 | 6.34 | 0.33 | 75 | 3.45 | 5.11 |
| hsa-asg-9198 | hsa-asg-9198_st1 | 5.2 | 3.23 | 5.51 | 3.84 | 4.45 | 1.10 | 25 | 2.91 | 2.72 |
| hsa-asg-9980 | hsa-asg-9980_st1 | 6.4 | 5.33 | 5.88 | 5.31 | 5.73 | 0.52 | 50 | 2.91 | 4.14 |
| hsa-miR-409-5p | hsa-miR-409-5p_st1 | 8.0 | 7.39 | 7.37 | 8.08 | 7.72 | 0.39 | 100 | 5.81 | 5.28 |
| hsa-asg-13705 | hsa-asg-13705_st1 | 5.6 | 5.38 | 5.03 | 4.94 | 5.24 | 0.31 | 25 | 3.10 | 2.72 |
| hsa-asg-13270 | hsa-asg-13270_st2 | 5.4 | 6.68 | 5.64 | 4.94 | 5.67 | 0.74 | 50 | 4.00 | 4.14 |
| hsa-asg-2027 | hsa-asg-2027_st1 | 4.4 | 5.58 | 5.79 | 5.01 | 5.20 | 0.62 | 25 | 3.67 | 2.19 |
| hsa-asg-360 | hsa-asg-360_st2 | 5.7 | 6.12 | 6.26 | 5.12 | 5.80 | 0.51 | 25 | 4.20 | 3.97 |
| hsa-miR-148b | hsa-miR-148b_st2 | 9.7 | 10.2 | 10.21 | 9.76 | 9.99 | 0.28 | 100 | 9.00 | 9.14 |
| hsa-asg-13011 | hsa-asg-13011_st2 | 5.9 | 6.21 | 5.39 | 5.77 | 5.84 | 0.35 | 75 | 4.49 | 3.78 |
| hsa-miR-576 | hsa-miR-576_st2 | 6.2 | 3.61 | 5.47 | 5.18 | 5.13 | 1.11 | 25 | 2.84 | 2.98 |
| hsa-asg-11361 | hsa-asg-11361_st2 | 5.1 | 4.83 | 5.51 | 5.05 | 5.15 | 0.29 | 50 | 3.34 | 2.98 |
| hsa-miR-148a | hsa-miR-148a_st1 | 11.9 | 11.2 | 11.80 | 11.55 | 11.63 | 0.32 | 100 | 10.21 | 10.99 |
| hsa-cand207 | hsa-cand207_st1 | 5.5 | 4.75 | 5.72 | 5.97 | 5.50 | 0.53 | 75 | 4.00 | 3.24 |
| hsa-miR-34b | hsa-miR-34b_st2 | 6.3 | 6.86 | 6.68 | 5.95 | 6.45 | 0.40 | 100 | 5.04 | 4.44 |
| hsa-asg-13258 | hsa-asg-13258_st2 | 9.8 | 9.28 | 8.82 | 9.26 | 9.30 | 0.42 | 100 | 7.64 | 8.26 |
| hsa-asg-2301 | hsa-asg-2301_st2 | 7.3 | 7.99 | 7.50 | 8.25 | 7.78 | 0.41 | 100 | 6.07 | 6.27 |
| hsa-miR-421 | hsa-miR-421-3p_st1 | 9.2 | 9.68 | 9.72 | 9.86 | 9.63 | 0.27 | 100 | 7.97 | 8.53 |
| hsa-miR-421 | hsa-asg-5033_st2 | 8.2 | 9.02 | 8.86 | 9.10 | 8.81 | 0.38 | 100 | 7.14 | 7.53 |
| hsa-asg-8344 | hsa-asg-8344_st2 | 5.1 | 5.82 | 5.85 | 5.37 | 5.55 | 0.34 | 50 | 3.22 | 4.57 |
| hsa-miR-10a | hsa-miR-10a_st1 | 12.3 | 12.2 | 12.00 | 12.08 | 12.16 | 0.17 | 100 | 10.73 | 11.47 |
| hsa-asg-2365 | hsa-asg-2365_st1 | 6.5 | 7.26 | 7.04 | 6.19 | 6.76 | 0.48 | 100 | 5.35 | 5.50 |
| hsa-asg-10247 | hsa-asg-10247_st1 | 5.4 | 5.58 | 5.18 | 4.55 | 5.18 | 0.45 | 25 | 3.10 | 3.11 |
| hsa-asg-10626 | hsa-asg-10626_st2 | 6.4 | 5.66 | 5.88 | 5.70 | 5.92 | 0.36 | 100 | 4.58 | 4.51 |
| hsa-asg-13997 | hsa-asg-13997_st2 | 5.5 | 3.51 | 5.99 | 5.45 | 5.11 | 1.10 | 75 | 2.71 | 3.11 |
| hsa-miR-493-3p | hsa-miR-493-3p_st1 | 6.6 | 5.63 | 6.44 | 5.98 | 6.18 | 0.46 | 50 | 4.79 | 4.14 |
| hsa-miR-28 | hsa-miR-28_st1 | 11.5 | 11.4 | 11.26 | 11.63 | 11.47 | 0.15 | 100 | 10.20 | 10.44 |
| hsa-miR-340 | hsa-miR-340_st1 | 5.3 | 6.14 | 6.57 | 6.50 | 6.14 | 0.56 | 50 | 4.49 | 5.36 |
| hsa-miR-135b | hsa-cand78_st1 | 4.8 | 6.08 | 4.06 | 5.37 | 5.09 | 0.85 | 25 | 4.04 | 2.98 |
| hsa-asg-10830 | hsa-asg-10830_st2 | 5.1 | 5.44 | 5.08 | 4.73 | 5.11 | 0.29 | 25 | 3.40 | 3.97 |
| hsa-miR-585 | hsa-miR-585_st1 | 5.4 | 5.55 | 4.36 | 5.50 | 5.21 | 0.57 | 25 | 3.16 | 3.24 |
| hsa-asg-14138 | hsa-asg-14138_st2 | 6.5 | 6.84 | 5.77 | 6.77 | 6.48 | 0.49 | 75 | 5.51 | 4.96 |
| hsa-asg-11199 | hsa-asg-11199_st2 | 12.9 | 12.6 | 12.19 | 12.60 | 12.60 | 0.33 | 100 | 11.55 | 11.67 |
| hsa-miR-151 | hsa-miR-151_st2 | 10.8 | 10.8 | 10.45 | 10.69 | 10.70 | 0.18 | 100 | 9.51 | 9.56 |
| hsa-asg-8428 | hsa-asg-8428_st2 | 5.8 | 4.29 | 5.22 | 4.50 | 4.96 | 0.71 | 25 | 3.22 | 3.47 |
| hsa-asg-4219 | hsa-asg-4219_st1 | 5.1 | 5.37 | 4.97 | 4.69 | 5.04 | 0.28 | 25 | 3.04 | 3.47 |
| hsa-miR-324-3p | hsa-miR-324-3p_st1 | 8.3 | 9.23 | 8.69 | 8.94 | 8.80 | 0.38 | 25 | 7.28 | 7.58 |
| hsa-miR-422a | hsa-miR-422a_st1 | 9.1 | 9.56 | 9.65 | 9.46 | 9.44 | 0.24 | 100 | 7.31 | 8.59 |
| hsa-asg-2967 | hsa-asg-2967_st2 | 5.1 | 5.76 | 5.44 | 5.15 | 5.38 | 0.28 | 25 | 3.56 | 4.06 |
| hsa-miR-34a | hsa-miR-34a_st1 | 9.4 | 9.90 | 9.78 | 9.51 | 9.66 | 0.21 | 100 | 8.60 | 9.04 |
| hsa-miR-100 | hsa-miR-100_st2 | 13.0 | 13.2 | 13.20 | 13.13 | 13.17 | 0.07 | 100 | 11.57 | 12.33 |
| hsa-miR-100 | hsa-cand375_st1 | 12.8 | 12.9 | 12.87 | 12.79 | 12.85 | 0.07 | 100 | 11.65 | 12.30 |
| hsa-miR-30e-3p | hsa-miR-30e-3p_st1 | 8.4 | 8.84 | 8.96 | 8.43 | 8.66 | 0.28 | 100 | 7.46 | 8.19 |
| hsa-asg-8878 | hsa-asg-8878_st2 | 10.3 | 10.7 | 9.94 | 11.14 | 10.54 | 0.51 | 100 | 9.33 | 9.97 |
| hsa-miR-422b | hsa-miR-422b_st2 | 10.6 | 11.2 | 11.15 | 10.91 | 10.97 | 0.27 | 100 | 9.09 | 10.11 |
| hsa-miR-542-3p | hsa-miR-542-3p_st1 | 7.8 | 7.24 | 7.82 | 7.32 | 7.55 | 0.31 | 100 | 6.03 | 5.90 |
| hsa-asg-10336 | hsa-asg-10336_st1 | 5.6 | 5.50 | 5.13 | 4.97 | 5.31 | 0.32 | 25 | 3.95 | 4.37 |
| hsa-miR-561 | hsa-miR-561_st1 | 5.0 | 3.61 | 6.31 | 4.17 | 4.78 | 1.18 | 25 | 3.10 | 3.24 |
| hsa-miR-141 | hsa-miR-141_st1 | 7.6 | 5.96 | 5.35 | 5.68 | 6.16 | 1.03 | 75 | 4.64 | 5.28 |
| hsa-asg-3967 | hsa-asg-3967_st2 | 8.0 | 8.37 | 8.15 | 8.30 | 8.21 | 0.16 | 100 | 6.90 | 7.18 |
| hsa-asg-280 | hsa-asg-280_st1 | 5.2 | 4.88 | 4.97 | 4.34 | 4.86 | 0.38 | 25 | 3.22 | 3.24 |
| hsa-asg-548 | hsa-asg-548_st1 | 5.0 | 5.58 | 4.15 | 4.86 | 4.91 | 0.59 | 25 | 3.45 | 3.88 |
| hsa-miR-628 | hsa-miR-628_st2 | 8.1 | 7.99 | 8.05 | 8.80 | 8.25 | 0.38 | 100 | 6.87 | 7.26 |
| hsa-miR-452* | hsa-miR-452-_st1 | 5.8 | 4.86 | 3.86 | 4.17 | 4.69 | 0.89 | 25 | 3.10 | 2.98 |
| hsa-miR-193a | hsa-miR-193a_st1 | 5.2 | 5.98 | 5.79 | 6.17 | 5.80 | 0.39 | 100 | 4.39 | 3.97 |
| hsa-cand26 | hsa-cand26_st2 | 6.8 | 6.74 | 6.37 | 7.81 | 6.93 | 0.62 | 100 | 5.28 | 5.92 |
| hsa-cand720 | hsa-cand720_st1 | 6.8 | 6.28 | 6.81 | 7.01 | 6.74 | 0.32 | 100 | 4.79 | 5.83 |
| hsa-asg-5715 | hsa-asg-5715_st2 | 6.2 | 6.53 | 6.08 | 6.23 | 6.28 | 0.19 | 75 | 4.73 | 5.79 |
| hsa-miR-331 | hsa-asg-14205_st1 | 7.4 | 7.94 | 7.92 | 8.24 | 7.90 | 0.31 | 100 | 6.37 | 7.04 |
| hsa-miR-331 | hsa-miR-331_st2 | 8.7 | 9.16 | 9.04 | 9.45 | 9.10 | 0.29 | 100 | 7.95 | 8.77 |
| hsa-asg-10391 | hsa-asg-10391_st2 | 6.7 | 6.59 | 6.85 | 5.12 | 6.32 | 0.81 | 75 | 4.73 | 4.94 |
| hsa-asg-11380 | hsa-asg-11380_st2 | 5.1 | 3.80 | 5.88 | 4.11 | 4.74 | 0.96 | 25 | 2.97 | 3.47 |
| hsa-miR-324-5p | hsa-miR-324-5p_st1 | 8.8 | 9.61 | 9.11 | 9.18 | 9.18 | 0.33 | 100 | 7.44 | 8.03 |
| hsa-asg-6758 | hsa-asg-6758_st1 | 5.2 | 4.91 | 4.86 | 4.28 | 4.82 | 0.39 | 25 | 4.00 | 2.98 |
| hsa-asg-8380 | hsa-asg-8380_st2 | 4.8 | 5.82 | 6.33 | 4.97 | 5.49 | 0.70 | 25 | 3.86 | 4.91 |
| hsa-cand330 | hsa-cand330_st2 | 5.8 | 4.93 | 4.68 | 5.68 | 5.29 | 0.57 | 50 | 4.35 | 4.37 |
| hsa-asg-13279 | hsa-asg-13279_st1 | 7.6 | 7.85 | 7.71 | 8.11 | 7.84 | 0.20 | 100 | 6.65 | 7.16 |
| hsa-asg-11181 | hsa-asg-11181_st1 | 5.8 | 6.97 | 6.43 | 6.86 | 6.53 | 0.50 | 50 | 5.04 | 5.41 |
| hsa-miR-338 | hsa-miR-338_st1 | 4.9 | 6.17 | 4.74 | 6.03 | 5.48 | 0.72 | 75 | 4.04 | 4.30 |
| hsa-miR-186 | hsa-miR-186_st1 | 7.3 | 7.88 | 7.63 | 7.83 | 7.67 | 0.26 | 100 | 6.60 | 7.17 |
| hsa-asg-3811 | hsa-asg-3811_st1 | 11.3 | 12.0 | 11.88 | 11.92 | 11.79 | 0.34 | 100 | 10.68 | 11.14 |
| hsa-asg-13406 | hsa-asg-13406_st2 | 4.6 | 5.33 | 5.59 | 4.28 | 4.96 | 0.60 | 25 | 3.40 | 3.88 |
| hsa-asg-12465 | hsa-asg-12465_st1 | 5.5 | 5.54 | 5.31 | 5.74 | 5.53 | 0.18 | 25 | 4.55 | 4.57 |
| hsa-asg-3902 | hsa-asg-3902_st1 | 5.3 | 4.86 | 4.80 | 4.94 | 4.99 | 0.26 | 25 | 3.28 | 4.06 |
| hsa-asg-11877 | hsa-asg-11877_st1 | 6.8 | 4.70 | 4.83 | 5.82 | 5.54 | 0.99 | 25 | 4.20 | 3.78 |
| hsa-miR-143 | hsa-miR-143_st2 | 13.2 | 13.1 | 13.01 | 13.04 | 13.11 | 0.10 | 100 | 12.27 | 12.46 |
| hsa-asg-3998 | hsa-asg-3998_st1 | 8.5 | 9.01 | 9.20 | 8.71 | 8.87 | 0.29 | 100 | 7.22 | 8.34 |
| hsa-asg-10278 | hsa-asg-10278_st2 | 4.3 | 5.33 | 5.33 | 5.32 | 5.09 | 0.47 | 75 | 3.91 | 4.10 |
| hsa-asg-4122 | hsa-asg-4122_st2 | 5.7 | 7.21 | 6.90 | 5.55 | 6.35 | 0.82 | 100 | 5.08 | 5.50 |
| hsa-asg-10113 | hsa-asg-10113_st1 | 6.1 | 4.98 | 5.39 | 4.90 | 5.35 | 0.56 | 25 | 3.34 | 4.06 |
| hsa-miR-128b | hsa-miR-128b_st1 | 10.7 | 10.5 | 10.60 | 10.95 | 10.71 | 0.20 | 100 | 10.02 | 10.11 |
| hsa-asg-9723 | hsa-asg-9723_st2 | 4.9 | 3.29 | 5.66 | 4.04 | 4.49 | 1.04 | 50 | 2.84 | 3.24 |
| hsa-miR-128a | hsa-miR-128a_st2 | 10.2 | 10.0 | 10.23 | 10.48 | 10.24 | 0.18 | 100 | 9.46 | 9.69 |
| hsa-miR-31 | hsa-miR-31_st2 | 12.7 | 11.7 | 12.03 | 11.12 | 11.92 | 0.69 | 100 | 11.34 | 10.17 |
| hsa-asg-14048 | hsa-asg-14048_st1 | 5.7 | 5.44 | 5.31 | 5.74 | 5.56 | 0.23 | 50 | 4.58 | 4.06 |
| hsa-asg-11906 | hsa-asg-11906_st1 | 5.0 | 6.42 | 5.33 | 5.79 | 5.64 | 0.60 | 50 | 3.81 | 4.64 |
| hsa-asg-9473 | hsa-asg-9473_st2 | 7.0 | 6.83 | 7.98 | 6.78 | 7.15 | 0.56 | 100 | 5.17 | 6.63 |
| hsa-miR-30d | hsa-miR-30d_st1 | 12.9 | 13.2 | 13.06 | 13.01 | 13.05 | 0.11 | 100 | 12.27 | 12.40 |
| hsa-asg-12083 | hsa-asg-12083_st1 | 6.3 | 6.28 | 5.51 | 5.93 | 6.03 | 0.40 | 75 | 4.87 | 4.51 |
| hsa-miR-30a-5p | hsa-miR-30a-5p_st2 | 12.2 | 12.5 | 12.35 | 12.51 | 12.42 | 0.14 | 100 | 11.56 | 11.94 |
| hsa-miR-425-3p | hsa-miR-425_st2 | 6.9 | 7.70 | 6.68 | 7.06 | 7.11 | 0.43 | 75 | 5.98 | 6.96 |
| hsa-asg-12346 | hsa-asg-12346_st2 | 7.3 | 8.23 | 7.88 | 8.50 | 7.98 | 0.51 | 75 | 6.78 | 7.13 |
| hsa-miR-98 | hsa-miR-98_st1 | 11.5 | 11.8 | 11.49 | 11.71 | 11.64 | 0.14 | 100 | 10.51 | 11.17 |
| hsa-asg-5304 | hsa-asg-5304_st1 | 10.4 | 10.6 | 10.71 | 10.87 | 10.65 | 0.19 | 100 | 9.51 | 10.56 |
| hsa-asg-11285 | hsa-asg-11285_st2 | 5.3 | 5.23 | 5.62 | 5.31 | 5.38 | 0.17 | 50 | 4.49 | 4.06 |
| hsa-asg-153 | hsa-asg-153_st2 | 5.5 | 4.61 | 4.55 | 4.17 | 4.72 | 0.58 | 25 | 2.32 | 4.06 |
| hsa-miR-212 | hsa-miR-212_st2 | 7.4 | 6.93 | 5.86 | 6.76 | 6.74 | 0.64 | 75 | 6.14 | 5.50 |
| hsa-asg-13135 | hsa-asg-13135_st1 | 6.6 | 6.59 | 6.22 | 7.81 | 6.83 | 0.69 | 100 | 5.83 | 6.02 |
| hsa-asg-13308 | hsa-asg-13308_st2 | 10.3 | 10.5 | 10.34 | 10.79 | 10.50 | 0.21 | 100 | 9.47 | 10.39 |
| hsa-asg-4542 | hsa-asg-4542_st2 | 5.8 | 5.91 | 5.22 | 5.81 | 5.69 | 0.32 | 75 | 4.70 | 4.81 |
| hsa-asg-8266 | hsa-asg-8266_st2 | 5.9 | 5.60 | 5.51 | 4.69 | 5.45 | 0.54 | 50 | 4.31 | 4.44 |
| hsa-asg-9848 | hsa-asg-9848_st1 | 5.3 | 5.37 | 5.03 | 6.60 | 5.59 | 0.69 | 25 | 3.77 | 4.64 |
| hsa-asg-5873 | hsa-asg-5873_st2 | 5.5 | 6.72 | 6.85 | 6.28 | 6.36 | 0.58 | 100 | 4.84 | 5.95 |
| hsa-asg-7803 | hsa-asg-7803_st2 | 4.8 | 5.88 | 4.15 | 5.70 | 5.15 | 0.80 | 50 | 4.00 | 4.30 |
| hsa-asg-3038 | hsa-asg-3038_st2 | 6.3 | 6.68 | 6.08 | 5.91 | 6.25 | 0.33 | 75 | 5.19 | 4.96 |
| hsa-miR-320 | hsa-miR-320_st1 | 12.0 | 12.3 | 12.27 | 12.42 | 12.28 | 0.17 | 100 | 11.35 | 11.67 |
| hsa-miR-598 | hsa-miR-598_st2 | 6.7 | 7.29 | 6.35 | 7.19 | 6.90 | 0.43 | 100 | 5.76 | 6.55 |
| hsa-miR-30e-5p | hsa-miR-30e-5p_st2 | 10.0 | 10.7 | 10.29 | 10.34 | 10.35 | 0.26 | 100 | 9.26 | 10.26 |
| hsa-asg-13661 | hsa-asg-13661_st1 | 7.3 | 6.05 | 5.51 | 6.48 | 6.34 | 0.77 | 50 | 4.94 | 5.55 |
| hsa-let-7e | hsa-let-7e_st1 | 13.0 | 12.9 | 12.83 | 13.24 | 13.03 | 0.17 | 100 | 12.02 | 12.57 |
| hsa-asg-1399 | hsa-asg-1399_st1 | 5.6 | 5.09 | 5.08 | 5.79 | 5.39 | 0.36 | 50 | 4.92 | 4.06 |
| hsa-asg-12403 | hsa-asg-12403_st2 | 5.6 | 6.27 | 5.08 | 6.39 | 5.84 | 0.61 | 75 | 5.04 | 5.19 |
| hsa-asg-1782 | hsa-asg-1782_st2 | 4.5 | 4.55 | 3.86 | 4.39 | 4.34 | 0.32 | 25 | 2.71 | 3.88 |
| hsa-asg-8476 | hsa-asg-8476_st1 | 7.4 | 7.85 | 7.61 | 7.75 | 7.65 | 0.19 | 75 | 5.64 | 7.01 |
| hsa-miR-197 | hsa-miR-197_st1 | 10.2 | 9.70 | 9.81 | 10.48 | 10.07 | 0.37 | 100 | 9.71 | 9.36 |
| hsa-miR-24 | hsa-miR-24_st1 | 13.6 | 13.6 | 13.55 | 13.52 | 13.60 | 0.07 | 100 | 12.87 | 13.03 |
| hsa-asg-5973 | hsa-asg-5973_st1 | 5.7 | 6.17 | 6.31 | 6.19 | 6.11 | 0.23 | 100 | 5.68 | 4.91 |
| hsa-asg-5740 | hsa-asg-5740_st2 | 5.7 | 5.35 | 6.00 | 5.45 | 5.64 | 0.30 | 25 | 4.31 | 5.15 |
| hsa-miR-376a* | hsa-miR-376a-_st2 | 5.6 | 5.42 | 5.69 | 5.55 | 5.59 | 0.13 | 50 | 5.04 | 4.81 |
| hsa-asg-3614 | hsa-asg-3614_st1 | 6.2 | 4.86 | 4.92 | 5.05 | 5.27 | 0.67 | 25 | 4.12 | 4.26 |
| hsa-miR-641 | hsa-miR-641_st1 | 5.6 | 3.76 | 4.32 | 4.17 | 4.47 | 0.81 | 25 | 3.22 | 3.35 |
| hsa-asg-2596 | hsa-asg-2596_st2 | 4.4 | 5.47 | 5.44 | 6.03 | 5.35 | 0.64 | 25 | 4.45 | 4.86 |
| hsa-asg-2992 | hsa-asg-2992_st1 | 5.2 | 6.64 | 6.10 | 6.01 | 6.00 | 0.56 | 25 | 4.61 | 5.04 |
| hsa-miR-30a-3p | hsa-miR-30a-3p_st1 | 8.9 | 8.63 | 8.91 | 9.56 | 9.00 | 0.39 | 100 | 8.19 | 8.70 |
| hsa-asg-3604 | hsa-asg-3604_st1 | 6.1 | 6.57 | 6.41 | 6.05 | 6.31 | 0.23 | 100 | 5.61 | 5.95 |
| hsa-miR-454-3p | hsa-asg-11541_st2 | 8.7 | 8.94 | 8.30 | 8.87 | 8.71 | 0.29 | 100 | 8.05 | 8.30 |
| hsa-asg-8737 | hsa-asg-8737_st1 | 8.9 | 8.79 | 8.58 | 9.11 | 8.86 | 0.23 | 75 | 7.74 | 7.71 |
| hsa-asg-8354 | hsa-asg-8354_st2 | 4.7 | 4.70 | 4.06 | 5.81 | 4.82 | 0.73 | 25 | 3.72 | 3.97 |
| hsa-asg-12998 | hsa-asg-12998_st1 | 4.4 | 4.88 | 5.91 | 4.94 | 5.03 | 0.63 | 25 | 3.77 | 4.14 |
| hsa-asg-9815 | hsa-asg-9815_st2 | 6.2 | 6.66 | 6.50 | 6.32 | 6.43 | 0.19 | 75 | 5.48 | 5.73 |
| hsa-asg-5053 | hsa-asg-5053_st1 | 6.5 | 5.94 | 6.73 | 6.61 | 6.46 | 0.35 | 100 | 5.76 | 5.57 |
| hsa-asg-13905 | hsa-asg-13905_st1 | 5.4 | 5.37 | 4.74 | 3.91 | 4.87 | 0.72 | 25 | 3.72 | 4.44 |
| hsa-asg-11397 | hsa-asg-11397_st1 | 5.1 | 4.83 | 3.76 | 4.90 | 4.66 | 0.62 | 25 | 3.34 | 3.88 |
| hsa-let-7b | hsa-let-7b_st2 | 14.3 | 14.4 | 14.50 | 14.24 | 14.37 | 0.12 | 100 | 13.9 | 14.0 |
| hsa-miR-510 | hsa-miR-510_st2 | 5.5 | 5.44 | 5.69 | 5.37 | 5.51 | 0.14 | 50 | 4.58 | 4.91 |
| hsa-asg-14015 | hsa-asg-14015_st1 | 6.3 | 5.00 | 6.31 | 6.01 | 5.91 | 0.62 | 25 | 4.79 | 5.34 |

| | | | | | | LNneg vs NCX | | |
|---|---|---|---|---|---|---|---|---|
| | LNneg | | | | | | Log2 | Fold |
| Micro RNA | 3 | 4 | Mean | SD | % | ttest | Diff | change |
| hsa-miR-205 | 2.65 | 3.57 | 2.98 | 0.75 | 0 | 2.11E−04 | −8.69 | 413.8 |
| hsa-miR-368 | 3.32 | 3.48 | 3.84 | 0.52 | 0 | 1.40E−07 | −7.55 | 187.2 |
| hsa-miR-203 | 3.59 | 4.15 | 4.55 | 0.84 | 0 | 1.25E−04 | −7.42 | 171.5 |
| hsa-miR-495 | 3.12 | 2.94 | 3.00 | 0.22 | 0 | 8.71E−09 | −7.11 | 138.2 |
| hsa-miR-375 | 4.05 | 2.47 | 3.65 | 0.97 | 0 | 3.19E−05 | −6.81 | 112.3 |
| hsa-miR-487b | 2.71 | 3.92 | 3.81 | 0.78 | 0 | 7.75E−06 | −6.71 | 104.8 |
| hsa-asg-5021 | 3.12 | 2.82 | 3.31 | 0.52 | 0 | 1.24E−06 | −6.60 | 97.3 |
| hsa-miR-200a | 3.83 | 3.48 | 4.51 | 1.04 | 25 | 4.23E−05 | −6.33 | 80.6 |
| hsa-miR-299-5p | 2.71 | 3.38 | 3.40 | 0.55 | 0 | 5.39E−07 | −6.29 | 78.3 |
| hsa-miR-493-5p | 2.38 | 3.27 | 3.28 | 0.72 | 0 | 2.61E−06 | −6.25 | 76.2 |
| hsa-asg-13254 | 3.76 | 3.11 | 3.70 | 0.57 | 0 | 3.03E−06 | −6.17 | 72.2 |
| hsa-miR-200b | 5.92 | 6.17 | 6.62 | 0.80 | 100 | 1.41E−05 | −6.01 | 64.3 |
| hsa-miR-133b | 4.96 | 3.57 | 4.32 | 0.65 | 0 | 9.41E−05 | −6.01 | 64.2 |
| hsa-miR-187 | 2.76 | 2.01 | 2.75 | 0.84 | 0 | 1.98E−05 | −5.97 | 62.7 |
| hsa-miR-133a | 5.51 | 3.96 | 5.05 | 0.97 | 0 | 1.69E−04 | −5.94 | 61.4 |
| hsa-miR-200c | 7.04 | 6.42 | 7.40 | 0.83 | 100 | 1.59E−05 | −5.75 | 53.7 |
| hsa-miR-411 | 2.92 | 2.88 | 2.98 | 0.29 | 0 | 1.26E−07 | −5.72 | 52.5 |
| hsa-asg-9696 | 4.37 | 3.80 | 5.21 | 1.36 | 25 | 1.82E−04 | −5.65 | 50.1 |
| hsa-miR-127 | 5.48 | 5.52 | 5.76 | 0.30 | 25 | 4.67E−07 | −5.65 | 50.0 |
| hsa-miR-432 | 2.81 | 4.67 | 3.81 | 0.78 | 0 | 2.13E−05 | −5.64 | 49.9 |
| hsa-miR-424 | 3.91 | 2.71 | 4.34 | 1.31 | 25 | 1.85E−04 | −5.49 | 45.1 |
| hsa-asg-14153 | 2.71 | 2.59 | 2.73 | 0.17 | 0 | 4.57E−07 | −5.40 | 42.2 |
| hsa-miR-455 | 3.50 | 3.43 | 3.69 | 1.07 | 0 | 1.70E−04 | −5.36 | 41.1 |
| hsa-miR-503 | 5.42 | 5.75 | 5.87 | 0.51 | 25 | 1.49E−06 | −5.36 | 41.0 |
| hsa-miR-503 | 6.06 | 6.23 | 6.31 | 0.40 | 75 | 7.07E−07 | −4.85 | 28.8 |
| hsa-asg-14176 | 4.22 | 2.59 | 4.26 | 1.22 | 0 | 2.40E−04 | −5.00 | 32.1 |
| hsa-miR-154 | 2.49 | 3.22 | 2.99 | 0.38 | 0 | 5.09E−06 | −4.90 | 29.9 |
| hsa-miR-381 | 2.92 | 2.77 | 2.92 | 0.67 | 0 | 1.10E−05 | −4.86 | 29.0 |
| hsa-miR-409-3p | 3.12 | 3.16 | 3.10 | 0.23 | 0 | 4.59E−06 | −4.80 | 27.9 |
| hsa-miR-199b | 6.54 | 6.50 | 6.71 | 0.63 | 100 | 9.91E−06 | −4.71 | 26.1 |
| hsa-miR-134 | 4.42 | 4.22 | 4.49 | 0.23 | 0 | 8.49E−07 | −4.66 | 25.3 |
| hsa-miR-204 | 5.13 | 3.43 | 5.07 | 1.29 | 25 | 4.92E−04 | −4.64 | 24.9 |
| hsa-miR-376a | 3.83 | 3.27 | 3.69 | 0.30 | 0 | 2.76E−06 | −4.64 | 24.9 |
| hsa-miR-376a | 3.83 | 3.27 | 3.69 | 0.30 | 0 | 2.76E−06 | −4.64 | 24.9 |
| hsa-miR-376a | 2.92 | 3.38 | 3.47 | 0.50 | 0 | 4.93E−05 | −3.99 | 15.9 |
| hsa-asg-7637 | 4.09 | 3.05 | 3.75 | 0.59 | 0 | 3.28E−05 | −4.60 | 24.3 |
| hsa-miR-189 | 3.17 | 3.67 | 3.84 | 0.63 | 0 | 8.41E−06 | −4.59 | 24.1 |
| hsa-miR-429 | 3.59 | 3.38 | 3.33 | 0.21 | 0 | 1.05E−04 | −4.57 | 23.7 |
| hsa-miR-450 | 3.02 | 3.27 | 3.24 | 0.25 | 0 | 5.73E−06 | −4.45 | 21.8 |
| hsa-miR-450 | 3.41 | 3.76 | 3.45 | 0.44 | 0 | 7.77E−04 | −3.41 | 10.6 |
| hsa-miR-1 | 8.01 | 5.75 | 7.45 | 1.20 | 100 | 3.80E−04 | −4.41 | 21.2 |
| hsa-miR-494 | 5.10 | 6.09 | 5.50 | 0.43 | 50 | 1.78E−05 | −4.38 | 20.8 |
| hsa-miR-494 | 5.74 | 6.05 | 5.67 | 0.30 | 75 | 1.64E−05 | −3.30 | 9.9 |
| hsa-miR-369-5p | 2.60 | 3.57 | 3.00 | 0.44 | 0 | 1.18E−05 | −4.32 | 19.9 |
| hsa-miR-369-5p | 2.49 | 3.16 | 3.03 | 0.36 | 0 | 7.96E−05 | −3.62 | 12.3 |
| hsa-miR-132 | 6.00 | 4.42 | 6.09 | 1.23 | 25 | 5.37E−04 | −4.30 | 19.7 |
| hsa-asg-13097 | 3.76 | 3.84 | 3.71 | 0.11 | 0 | 5.42E−07 | −4.22 | 18.7 |
| hsa-miR-379 | 6.26 | 6.20 | 6.18 | 0.11 | 75 | 2.28E−06 | −4.20 | 18.4 |
| hsa-miR-224 | 5.67 | 5.82 | 6.75 | 1.22 | 50 | 6.69E−04 | −4.15 | 17.7 |
| hsa-miR-224 | 5.81 | 6.49 | 7.00 | 1.08 | 100 | 4.19E−04 | −4.06 | 16.7 |
| hsa-miR-196b | 6.75 | 5.43 | 6.83 | 1.07 | 100 | 3.20E−04 | −4.14 | 17.6 |
| hsa-cand206 | 2.60 | 2.59 | 2.85 | 0.31 | 0 | 1.12E−06 | −4.14 | 17.6 |
| hsa-miR-539 | 2.38 | 2.47 | 2.51 | 0.14 | 0 | 2.13E−05 | −4.13 | 17.6 |
| hsa-miR-539 | 3.22 | 3.05 | 3.17 | 0.40 | 0 | 7.97E−05 | −3.01 | 8.1 |
| hsa-asg-5617 | 2.49 | 3.92 | 3.19 | 0.61 | 0 | 1.74E−05 | −4.13 | 17.6 |
| hsa-miR-382 | 5.08 | 6.41 | 5.94 | 0.59 | 25 | 4.17E−05 | −4.12 | 17.4 |
| hsa-miR202 | 3.22 | 3.05 | 3.21 | 0.27 | 0 | 1.05E−03 | −4.09 | 17.0 |
| hsa-miR-9* | 4.37 | 4.00 | 4.86 | 0.83 | 25 | 1.03E−04 | −3.89 | 14.9 |
| hsa-miR-542-5p | 4.53 | 3.62 | 3.80 | 0.66 | 0 | 3.02E−05 | −3.86 | 14.6 |
| hsa-asg-13404 | 2.97 | 3.27 | 3.17 | 0.43 | 0 | 2.71E−03 | −3.82 | 14.1 |
| hsa-asg-13166 | 2.92 | 3.05 | 3.52 | 0.62 | 0 | 7.79E−05 | −3.79 | 13.8 |
| hsa-miR-218 | 7.05 | 6.47 | 7.43 | 0.82 | 100 | 1.02E−04 | −3.78 | 13.8 |
| hsa-miR157 | 7.29 | 6.15 | 7.90 | 1.46 | 75 | 2.35E−03 | −3.70 | 13.0 |
| hsa-miR-9 | 2.60 | 3.92 | 3.52 | 0.62 | 0 | 4.21E−04 | −3.63 | 12.4 |
| hsa-miR-9 | 3.12 | 3.16 | 3.15 | 0.16 | 0 | 4.15E−04 | −2.85 | 7.2 |
| hsa-miR-329 | 3.41 | 2.47 | 3.21 | 0.63 | 0 | 4.23E−05 | −3.61 | 12.2 |
| hsa-miR-329 | 3.83 | 3.05 | 3.15 | 0.48 | 0 | 1.51E−05 | −3.53 | 11.5 |
| hsa-miR-329 | 3.02 | 4.00 | 3.46 | 0.41 | 0 | 1.74E−05 | −3.40 | 10.5 |
| hsa-miR-452 | 3.67 | 5.36 | 5.01 | 0.90 | 0 | 2.72E−04 | −3.61 | 12.2 |
| hsa-asg-562 | 8.97 | 7.63 | 9.35 | 1.34 | 100 | 1.72E−03 | −3.59 | 12.1 |
| hsa-miR-193b | 6.26 | 6.66 | 7.25 | 0.93 | 50 | 4.01E−04 | −3.54 | 11.6 |
| hsa-asg-10883 | 4.79 | 5.55 | 5.90 | 0.97 | 25 | 9.64E−04 | −3.53 | 11.5 |
| hsa-asg-9687 | 3.76 | 3.16 | 3.96 | 0.64 | 0 | 8.41E−05 | −3.50 | 11.3 |
| hsa-miR-485-5p | 2.87 | 3.27 | 3.02 | 0.56 | 0 | 1.54E−04 | −3.46 | 11.0 |
| hsa-miR-605 | 3.02 | 2.53 | 2.66 | 0.34 | 0 | 1.30E−05 | −3.40 | 10.6 |
| hsa-asg-14134 | 3.41 | 4.15 | 4.36 | 0.75 | 0 | 1.41E−04 | −3.38 | 10.4 |
| hsa-asg-8411 | 3.76 | 3.67 | 3.89 | 0.46 | 0 | 8.39E−05 | −3.31 | 9.9 |
| hsa-asg-13297 | 3.22 | 3.32 | 2.98 | 0.39 | 0 | 1.36E−02 | −3.31 | 9.9 |
| hsa-asg-14230 | 3.50 | 3.05 | 3.54 | 0.41 | 0 | 6.08E−06 | −3.25 | 9.5 |
| hsa-asg-13284 | 3.55 | 3.38 | 3.60 | 0.29 | 0 | 2.50E−05 | −3.23 | 9.4 |
| hsa-miR-433 | 3.80 | 3.76 | 3.53 | 0.45 | 0 | 2.28E−04 | −3.21 | 9.3 |
| hsa-asg-7472 | 2.12 | 3.67 | 3.10 | 0.69 | 0 | 1.69E−04 | −3.18 | 9.0 |
| hsa-miR-214 | 8.56 | 7.98 | 8.72 | 0.61 | 100 | 1.07E−04 | −3.17 | 9.0 |
| hsa-asg-10202 | 2.12 | 2.82 | 3.05 | 1.12 | 0 | 2.69E−03 | −3.09 | 8.5 |
| hsa-miR-574 | 8.02 | 7.16 | 8.18 | 0.83 | 100 | 4.87E−04 | −3.08 | 8.5 |
| hsa-miR-487a | 3.50 | 2.24 | 3.17 | 0.62 | 0 | 6.77E−05 | −3.07 | 8.4 |
| hsa-miR-487a | 4.53 | 4.00 | 4.27 | 0.25 | 0 | 6.99E−05 | −2.46 | 5.5 |
| hsa-asg-14172 | 3.02 | 3.76 | 3.80 | 0.63 | 0 | 1.28E−04 | −3.07 | 8.4 |
| hsa-asg-10131 | 3.50 | 2.71 | 3.04 | 0.40 | 0 | 2.06E−05 | −3.06 | 8.3 |
| hsa-miR-485-3p | 3.59 | 3.80 | 3.77 | 0.22 | 0 | 1.18E−05 | −3.05 | 8.3 |
| hsa-miR-485-3p | 3.67 | 4.12 | 4.02 | 0.30 | 0 | 4.21E−05 | −2.56 | 5.9 |
| hsa-miR-27b | 10.47 | 9.46 | 10.6 | 0.91 | 100 | 5.85E−04 | −3.04 | 8.2 |
| hsa-miR-183 | 4.31 | 5.77 | 5.60 | 0.95 | 25 | 2.16E−03 | −2.92 | 7.6 |
| hsa-miR-200a* | 3.67 | 2.77 | 3.27 | 0.40 | 0 | 3.15E−04 | −2.92 | 7.6 |
| hsa-miR-99b | 8.61 | 8.42 | 9.41 | 1.04 | 50 | 1.46E−03 | −2.91 | 7.5 |
| hsa-miR-99b | 8.83 | 8.43 | 9.54 | 1.09 | 75 | 2.09E−03 | −2.84 | 7.2 |
| hsa-miR-410 | 2.17 | 3.16 | 2.97 | 0.58 | 0 | 7.50E−04 | −2.90 | 7.5 |
| hsa-miR-497 | 5.27 | 6.05 | 6.49 | 1.12 | 25 | 4.20E−03 | −2.90 | 7.5 |
| hsa-miR-497 | 6.29 | 7.02 | 7.43 | 0.98 | 50 | 2.77E−03 | −2.75 | 6.7 |
| hsa-miR154 | 3.67 | 3.84 | 4.24 | 0.61 | 0 | 1.30E−04 | −2.90 | 7.4 |
| hsa-asg-1296 | 4.12 | 2.94 | 3.35 | 0.53 | 0 | 1.37E−04 | −2.86 | 7.3 |
| hsa-miR-152 | 9.52 | 8.66 | 9.86 | 1.00 | 100 | 1.37E−03 | −2.85 | 7.2 |
| hsa-miR-299-3p | 2.49 | 3.96 | 3.12 | 0.64 | 0 | 6.24E−04 | −2.84 | 7.2 |
| hsa-miR-299-3p | 3.22 | 4.00 | 3.47 | 0.45 | 0 | 9.09E−05 | −2.27 | 4.8 |
| hsa-asg-7465 | 3.02 | 2.94 | 3.77 | 0.91 | 0 | 4.57E−03 | −2.84 | 7.1 |
| hsa-miR-182 | 5.76 | 7.23 | 7.38 | 1.19 | 100 | 5.61E−03 | −2.83 | 7.1 |
| hsa-asg-9681 | 3.83 | 3.48 | 3.91 | 0.33 | 0 | 5.21E−06 | −2.79 | 6.9 |
| hsa-asg-7471 | 5.42 | 5.05 | 5.41 | 0.33 | 0 | 7.89E−06 | −2.78 | 6.9 |
| hsa-asg-11883 | 5.91 | 5.15 | 5.44 | 0.45 | 0 | 2.73E−05 | −2.77 | 6.8 |
| hsa-asg-13205 | 4.92 | 4.70 | 5.15 | 0.46 | 0 | 2.36E−05 | −2.73 | 6.6 |
| hsa-asg-14150 | 3.98 | 3.92 | 4.88 | 1.10 | 0 | 2.83E−03 | −2.73 | 6.6 |
| hsa-cand247 | 3.02 | 2.94 | 3.07 | 0.18 | 0 | 9.58E−05 | −2.72 | 6.6 |
| hsa-miR-654 | 4.02 | 4.35 | 3.82 | 0.52 | 0 | 7.01E−04 | −2.72 | 6.6 |
| hsa-miR-654 | 3.83 | 3.48 | 3.94 | 0.46 | 0 | 2.32E−03 | −2.36 | 5.1 |
| hsa-asg-2924 | 3.59 | 2.35 | 3.35 | 0.67 | 0 | 8.16E−04 | −2.71 | 6.5 |
| hsa-asg-12227 | 2.12 | 2.35 | 2.43 | 0.34 | 0 | 6.31E−04 | −2.67 | 6.4 |
| hsa-asg-10106 | 3.91 | 3.43 | 3.31 | 0.47 | 0 | 3.03E−02 | −2.65 | 6.3 |
| hsa-miR-130a | 8.95 | 8.16 | 9.24 | 0.85 | 100 | 1.10E−03 | −2.64 | 6.3 |
| hsa-miR-130a | 8.76 | 8.21 | 9.13 | 0.79 | 100 | 7.73E−04 | −2.64 | 6.2 |
| hsa-miR-374 | 3.91 | 3.84 | 4.26 | 0.47 | 0 | 2.03E−04 | −2.60 | 6.0 |
| hsa-miR-199a | 8.37 | 7.75 | 9.06 | 1.18 | 100 | 7.81E−03 | −2.58 | 6.0 |
| hsa-miR-370 | 4.61 | 4.42 | 4.26 | 0.62 | 0 | 3.79E−04 | −2.56 | 5.9 |
| hsa-miR-582 | 2.81 | 3.38 | 3.69 | 0.89 | 0 | 1.82E−02 | −2.54 | 5.8 |
| hsa-miR-365 | 4.25 | 2.82 | 4.00 | 0.80 | 0 | 1.81E−03 | −2.52 | 5.7 |
| hsa-miR-365 | 4.94 | 4.48 | 5.00 | 0.45 | 0 | 6.69E−04 | −2.32 | 5.0 |
| hsa-miR-365 | 5.45 | 4.08 | 4.93 | 0.85 | 25 | 3.08E−03 | −2.24 | 4.7 |
| hsa-miR-124a | 3.02 | 3.80 | 4.16 | 1.08 | 0 | 1.50E−02 | −2.52 | 5.7 |
| hsa-miR-124a | 3.46 | 4.15 | 4.16 | 0.51 | 0 | 2.30E−03 | −2.38 | 5.2 |
| hsa-asg-12964 | 2.54 | 3.48 | 2.94 | 0.63 | 0 | 1.10E−03 | −2.52 | 5.7 |
| hsa-asg-279 | 4.42 | 4.15 | 5.04 | 0.88 | 0 | 3.07E−03 | −2.49 | 5.6 |
| hsa-asg-3822 | 2.12 | 2.59 | 2.68 | 0.42 | 0 | 8.87E−05 | −2.47 | 5.5 |
| hsa-asg-11715 | 3.22 | 2.18 | 2.76 | 0.43 | 0 | 1.92E−04 | −2.46 | 5.5 |
| hsa-asg-13304 | 5.04 | 4.65 | 5.56 | 0.86 | 25 | 1.91E−03 | −2.46 | 5.5 |
| hsa-miR-184 | 3.22 | 4.67 | 4.41 | 0.79 | 0 | 1.26E−03 | −2.45 | 5.5 |
| hsa-miR-27a | 9.25 | 8.77 | 9.82 | 0.96 | 100 | 2.53E−03 | −2.41 | 5.3 |
| hsa-asg-924 | 4.18 | 4.00 | 4.25 | 0.55 | 0 | 3.29E−03 | −2.41 | 5.3 |
| hsa-asg-3376 | 4.25 | 3.62 | 3.99 | 0.34 | 0 | 7.01E−05 | −2.41 | 5.3 |
| hsa-miR-361 | 9.63 | 9.09 | 10.2 | 1.03 | 100 | 3.83E−03 | −2.41 | 5.3 |
| hsa-asg-14233 | 8.59 | 7.53 | 8.30 | 0.56 | 100 | 2.17E−04 | −2.40 | 5.3 |
| hsa-asg-8174 | 3.98 | 2.88 | 3.28 | 0.51 | 0 | 2.78E−04 | −2.38 | 5.2 |
| hsa-asg-2837 | 2.49 | 2.29 | 2.87 | 0.63 | 0 | 8.13E−03 | −2.34 | 5.1 |
| hsa-asg-10674 | 5.47 | 4.98 | 4.99 | 0.33 | 0 | 4.04E−05 | −2.33 | 5.0 |
| hsa-asg-14146 | 4.63 | 3.92 | 4.65 | 0.57 | 0 | 9.04E−04 | −2.32 | 5.0 |
| hsa-miR-376b | 2.81 | 2.94 | 2.66 | 0.33 | 0 | 2.39E−03 | −2.29 | 4.9 |
| hsa-miR-211 | 3.63 | 2.12 | 3.24 | 0.75 | 0 | 3.73E−02 | −2.28 | 4.9 |
| hsa-miR-154* | 3.67 | 3.76 | 4.37 | 0.80 | 0 | 2.06E−03 | −2.23 | 4.7 |
| hsa-asg-259 | 3.50 | 3.05 | 3.41 | 0.35 | 0 | 7.45E−05 | −2.23 | 4.7 |
| hsa-asg-1596 | 3.87 | 3.48 | 3.71 | 0.44 | 0 | 1.71E−04 | −2.22 | 4.7 |
| hsa-asg-13646 | 5.18 | 6.32 | 6.55 | 1.09 | 75 | 9.11E−03 | −2.19 | 4.6 |
| hsa-asg-14175 | 4.05 | 4.42 | 4.66 | 0.72 | 0 | 1.72E−03 | −2.18 | 4.5 |
| hsa-asg-4439 | 4.25 | 2.59 | 3.52 | 0.69 | 0 | 2.18E−02 | −2.18 | 4.5 |
| hsa-miR-99a | 10.59 | 10.1 | 10.9 | 0.88 | 100 | 2.85E−03 | −2.15 | 4.5 |
| hsa-miR-99a | 10.83 | 10.3 | 11.2 | 0.92 | 100 | 9.19E−03 | −1.74 | 3.3 |
| hsa-miR-499 | 3.12 | 3.38 | 3.72 | 0.96 | 0 | 1.88E−02 | −2.15 | 4.4 |
| hsa-miR-499 | 3.83 | 3.48 | 3.98 | 0.61 | 0 | 8.28E−03 | −2.03 | 4.1 |
| hsa-asg-3145 | 5.45 | 3.38 | 4.52 | 0.93 | 0 | 6.59E−03 | −2.14 | 4.4 |
| hsa-miR-504 | 3.22 | 4.00 | 3.64 | 0.36 | 0 | 4.63E−04 | −2.13 | 4.4 |
| hsa-miR-489 | 4.58 | 3.84 | 4.78 | 0.72 | 0 | 1.57E−03 | −2.13 | 4.4 |
| hsa-asg-12139 | 2.81 | 2.94 | 3.02 | 0.23 | 0 | 1.93E−04 | −2.09 | 4.2 |
| hsa-miR-149 | 3.67 | 4.80 | 4.26 | 0.82 | 0 | 3.26E−03 | −2.08 | 4.2 |
| hsa-asg-9198 | 1.97 | 1.96 | 2.39 | 0.50 | 0 | 1.40E−02 | −2.06 | 4.2 |
| hsa-asg-9980 | 3.59 | 4.04 | 3.67 | 0.56 | 0 | 1.72E−03 | −2.06 | 4.2 |
| hsa-miR-409-5p | 5.64 | 5.93 | 5.66 | 0.28 | 25 | 1.45E−04 | −2.06 | 4.2 |
| hsa-asg-13705 | 3.98 | 2.94 | 3.19 | 0.55 | 0 | 6.45E−04 | −2.05 | 4.1 |
| hsa-asg-13270 | 2.87 | 3.48 | 3.62 | 0.58 | 0 | 4.73E−03 | −2.04 | 4.1 |
| hsa-asg-2027 | 3.12 | 3.67 | 3.16 | 0.70 | 0 | 4.71E−03 | −2.04 | 4.1 |
| hsa-asg-360 | 3.22 | 3.67 | 3.77 | 0.42 | 0 | 8.72E−04 | −2.04 | 4.1 |
| hsa-miR-148b | 7.15 | 6.55 | 7.96 | 1.31 | 100 | 2.27E−02 | −2.03 | 4.1 |
| hsa-asg-13011 | 3.91 | 3.05 | 3.81 | 0.59 | 0 | 1.02E−03 | −2.03 | 4.1 |
| hsa-miR-576 | 3.02 | 3.57 | 3.11 | 0.32 | 0 | 1.27E−02 | −2.02 | 4.1 |
| hsa-asg-11361 | 2.92 | 3.27 | 3.13 | 0.21 | 0 | 2.73E−05 | −2.02 | 4.0 |
| hsa-miR-148a | 8.93 | 8.31 | 9.61 | 1.21 | 100 | 1.83E−02 | −2.02 | 4.0 |
| hsa-cand207 | 3.32 | 3.43 | 3.49 | 0.34 | 0 | 7.06E−04 | −2.00 | 4.0 |
| hsa-miR-34b | 5.10 | 3.27 | 4.46 | 0.85 | 0 | 5.38E−03 | −1.99 | 4.0 |
| hsa-asg-13258 | 6.41 | 7.00 | 7.33 | 0.80 | 100 | 4.72E−03 | −1.98 | 3.9 |
| hsa-asg-2301 | 5.51 | 5.43 | 5.82 | 0.42 | 100 | 5.19E−04 | −1.96 | 3.9 |
| hsa-miR-421 | 7.07 | 7.13 | 7.68 | 0.70 | 100 | 2.01E−03 | −1.95 | 3.9 |
| hsa-miR-421 | 6.56 | 6.40 | 6.91 | 0.52 | 100 | 1.04E−03 | −1.91 | 3.8 |
| hsa-asg-8344 | 3.02 | 3.57 | 3.60 | 0.69 | 0 | 2.29E−03 | −1.95 | 3.9 |
| hsa-miR-10a | 9.69 | 8.97 | 10.2 | 1.10 | 100 | 1.30E−02 | −1.95 | 3.9 |
| hsa-asg-2365 | 4.34 | 4.08 | 4.82 | 0.71 | 0 | 4.02E−03 | −1.95 | 3.9 |
| hsa-asg-10247 | 3.59 | 3.16 | 3.24 | 0.23 | 0 | 2.71E−04 | −1.94 | 3.8 |
| hsa-asg-10626 | 3.76 | 3.11 | 3.99 | 0.70 | 0 | 2.64E−03 | −1.93 | 3.8 |
| hsa-asg-13997 | 3.67 | 3.27 | 3.19 | 0.40 | 0 | 1.67E−02 | −1.92 | 3.8 |
| hsa-miR-493-3p | 3.12 | 5.02 | 4.27 | 0.85 | 0 | 7.56E−03 | −1.91 | 3.8 |
| hsa-miR-28 | 9.00 | 8.63 | 9.57 | 0.89 | 100 | 5.60E−03 | −1.90 | 3.7 |
| hsa-miR-340 | 4.18 | 2.94 | 4.24 | 1.00 | 0 | 1.64E−02 | −1.89 | 3.7 |
| hsa-miR-135b | 3.12 | 2.71 | 3.21 | 0.58 | 0 | 1.08E−02 | −1.88 | 3.7 |
| hsa-asg-10830 | 2.81 | 2.77 | 3.24 | 0.57 | 0 | 1.09E−03 | −1.87 | 3.7 |
| hsa-miR-585 | 3.80 | 3.16 | 3.34 | 0.31 | 0 | 1.16E−03 | −1.87 | 3.6 |
| hsa-asg-14138 | 3.67 | 4.48 | 4.66 | 0.78 | 0 | 7.46E−03 | −1.82 | 3.5 |
| hsa-asg-11199 | 10.11 | 9.80 | 10.7 | 0.96 | 100 | 1.20E−02 | −1.81 | 3.5 |
| hsa-miR-151 | 7.89 | 8.61 | 8.89 | 0.80 | 100 | 4.54E−03 | −1.81 | 3.5 |
| hsa-asg-8428 | 3.02 | 2.94 | 3.16 | 0.24 | 0 | 2.95E−03 | −1.80 | 3.5 |
| hsa-asg-4219 | 3.59 | 2.88 | 3.24 | 0.34 | 0 | 1.89E−04 | −1.79 | 3.5 |
| hsa-miR-324-3p | 6.29 | 6.95 | 7.03 | 0.55 | 0 | 1.85E−03 | −1.77 | 3.4 |
| hsa-miR-422a | 7.20 | 7.59 | 7.67 | 0.63 | 100 | 1.97E−03 | −1.77 | 3.4 |
| hsa-asg-2967 | 3.22 | 3.67 | 3.63 | 0.34 | 0 | 2.16E−04 | −1.76 | 3.4 |
| hsa-miR-34a | 6.82 | 7.21 | 7.92 | 1.07 | 100 | 1.85E−02 | −1.75 | 3.4 |
| hsa-miR-100 | 11.06 | 10.7 | 11.4 | 0.69 | 100 | 2.43E−03 | −1.74 | 3.3 |
| hsa-miR-100 | 11.11 | 10.8 | 11.4 | 0.63 | 100 | 5.10E−03 | −1.37 | 2.6 |
| hsa-miR-30e-3p | 6.10 | 6.00 | 6.93 | 1.07 | 100 | 2.05E−02 | −1.72 | 3.3 |
| hsa-asg-8878 | 8.21 | 7.85 | 8.84 | 0.98 | 100 | 2.16E−02 | −1.70 | 3.3 |
| hsa-miR-422b | 8.75 | 9.17 | 9.28 | 0.58 | 100 | 1.88E−03 | −1.69 | 3.2 |
| hsa-miR-542-3p | 6.00 | 5.52 | 5.86 | 0.23 | 75 | 1.33E−04 | −1.69 | 3.2 |
| hsa-asg-10336 | 3.02 | 3.16 | 3.63 | 0.64 | 0 | 3.30E−03 | −1.69 | 3.2 |
| hsa-miR-561 | 3.22 | 2.82 | 3.10 | 0.19 | 0 | 3.01E−02 | −1.68 | 3.2 |
| hsa-miR-141 | 4.12 | 3.88 | 4.48 | 0.62 | 0 | 3.11E−02 | −1.68 | 3.2 |
| hsa-asg-3967 | 6.40 | 5.65 | 6.53 | 0.67 | 75 | 2.75E−03 | −1.68 | 3.2 |
| hsa-asg-280 | 3.12 | 3.16 | 3.19 | 0.05 | 0 | 1.18E−04 | −1.67 | 3.2 |
| hsa-asg-548 | 2.71 | 2.94 | 3.25 | 0.53 | 0 | 5.70E−03 | −1.66 | 3.2 |
| hsa-miR-628 | 6.30 | 5.93 | 6.59 | 0.59 | 100 | 3.26E−03 | −1.66 | 3.1 |
| hsa-miR-452* | 3.02 | 3.05 | 3.04 | 0.05 | 0 | 9.98E−03 | −1.65 | 3.1 |
| hsa-miR-193a | 4.42 | 3.88 | 4.17 | 0.28 | 0 | 4.73E−04 | −1.64 | 3.1 |
| hsa-cand26 | 5.62 | 4.39 | 5.30 | 0.66 | 0 | 1.13E−02 | −1.63 | 3.1 |
| hsa-cand720 | 5.35 | 4.48 | 5.11 | 0.60 | 0 | 3.01E−03 | −1.63 | 3.1 |
| hsa-asg-5715 | 4.68 | 3.48 | 4.67 | 0.94 | 0 | 1.54E−02 | −1.61 | 3.1 |
| hsa-miR-331 | 5.83 | 5.94 | 6.29 | 0.55 | 25 | 2.24E−03 | −1.60 | 3.0 |
| hsa-miR-331 | 6.48 | 6.86 | 7.51 | 1.04 | 100 | 2.64E−02 | −1.58 | 3.0 |
| hsa-asg-10391 | 4.79 | 4.42 | 4.72 | 0.22 | 0 | 8.86E−03 | −1.60 | 3.0 |
| hsa-asg-11380 | 3.02 | 3.16 | 3.16 | 0.22 | 0 | 1.84E−02 | −1.58 | 3.0 |
| hsa-miR-324-5p | 7.23 | 7.71 | 7.60 | 0.34 | 100 | 5.76E−04 | −1.57 | 3.0 |
| hsa-asg-6758 | 3.50 | 2.53 | 3.25 | 0.64 | 0 | 5.71E−03 | −1.57 | 3.0 |
| hsa-asg-8380 | 3.67 | 3.38 | 3.96 | 0.67 | 0 | 1.95E−02 | −1.54 | 2.9 |
| hsa-cand330 | 2.71 | 3.67 | 3.77 | 0.78 | 0 | 2.05E−02 | −1.51 | 2.9 |
| hsa-asg-13279 | 5.58 | 5.92 | 6.33 | 0.71 | 50 | 6.44E−03 | −1.51 | 2.9 |
| hsa-asg-11181 | 5.41 | 4.22 | 5.02 | 0.56 | 0 | 6.95E−03 | −1.51 | 2.9 |
| hsa-miR-338 | 3.98 | 3.57 | 3.97 | 0.30 | 0 | 8.30E−03 | −1.51 | 2.8 |
| hsa-miR-186 | 5.51 | 5.36 | 6.16 | 0.87 | 75 | 1.58E−02 | −1.51 | 2.8 |
| hsa-asg-3811 | 10.33 | 9.15 | 10.3 | 0.85 | 100 | 1.84E−02 | −1.47 | 2.8 |
| hsa-asg-13406 | 2.92 | 3.80 | 3.50 | 0.44 | 0 | 7.74E−03 | −1.46 | 2.8 |
| hsa-asg-12465 | 3.91 | 3.27 | 4.08 | 0.62 | 0 | 4.00E−03 | −1.46 | 2.7 |
| hsa-asg-3902 | 3.41 | 3.43 | 3.55 | 0.35 | 0 | 5.58E−04 | −1.45 | 2.7 |
| hsa-asg-11877 | 4.12 | 4.29 | 4.10 | 0.22 | 0 | 2.91E−02 | −1.45 | 2.7 |
| hsa-miR-143 | 11.23 | 10.8 | 11.6 | 0.80 | 100 | 1.28E−02 | −1.42 | 2.7 |
| hsa-asg-3998 | 7.10 | 7.17 | 7.46 | 0.59 | 100 | 5.05E−03 | −1.42 | 2.7 |
| hsa-asg-10278 | 3.72 | 3.00 | 3.68 | 0.48 | 25 | 5.82E−03 | −1.41 | 2.7 |
| hsa-asg-4122 | 4.94 | 4.22 | 4.94 | 0.53 | 0 | 2.83E−02 | −1.41 | 2.7 |
| hsa-asg-10113 | 4.68 | 3.67 | 3.94 | 0.58 | 0 | 1.25E−02 | −1.41 | 2.7 |
| hsa-miR-128b | 8.52 | 8.57 | 9.31 | 0.88 | 100 | 2.05E−02 | −1.41 | 2.6 |
| hsa-asg-9723 | 3.59 | 2.71 | 3.09 | 0.40 | 0 | 4.60E−02 | −1.40 | 2.6 |
| hsa-miR-128a | 8.18 | 8.13 | 8.86 | 0.83 | 100 | 1.71E−02 | −1.38 | 2.6 |
| hsa-miR-31 | 9.90 | 10.7 | 10.5 | 0.64 | 100 | 2.62E−02 | −1.38 | 2.6 |
| hsa-asg-14048 | 3.59 | 4.51 | 4.18 | 0.46 | 0 | 1.67E−03 | −1.38 | 2.6 |
| hsa-asg-11906 | 4.34 | 4.29 | 4.27 | 0.34 | 0 | 7.39E−03 | −1.37 | 2.6 |
| hsa-asg-9473 | 4.94 | 6.41 | 5.79 | 0.85 | 50 | 3.78E−02 | −1.36 | 2.6 |
| hsa-miR-30d | 11.28 | 10.8 | 11.7 | 0.75 | 100 | 1.21E−02 | −1.35 | 2.6 |
| hsa-asg-12083 | 5.54 | 3.80 | 4.68 | 0.72 | 0 | 1.69E−02 | −1.35 | 2.6 |
| hsa-miR-30a-5p | 10.52 | 10.2 | 11.0 | 0.80 | 100 | 1.63E−02 | −1.35 | 2.5 |
| hsa-miR-425-3p | 5.00 | 5.11 | 5.76 | 0.91 | 50 | 3.70E−02 | −1.34 | 2.5 |
| hsa-asg-12346 | 6.70 | 5.94 | 6.64 | 0.50 | 0 | 9.46E−03 | −1.34 | 2.5 |
| hsa-miR-98 | 10.09 | 9.44 | 10.3 | 0.73 | 100 | 1.12E−02 | −1.34 | 2.5 |
| hsa-asg-5304 | 8.42 | 8.80 | 9.32 | 0.94 | 100 | 3.22E−02 | −1.33 | 2.5 |
| hsa-asg-11285 | 3.98 | 3.67 | 4.05 | 0.34 | 0 | 4.18E−04 | −1.33 | 2.5 |
| hsa-asg-153 | 3.91 | 3.27 | 3.39 | 0.79 | 0 | 3.56E−02 | −1.33 | 2.5 |
| hsa-miR-212 | 5.06 | 4.98 | 5.42 | 0.53 | 0 | 1.97E−02 | −1.32 | 2.5 |
| hsa-asg-13135 | 5.51 | 4.72 | 5.52 | 0.57 | 0 | 2.67E−02 | −1.30 | 2.5 |
| hsa-asg-13308 | 8.26 | 8.68 | 9.20 | 0.94 | 100 | 3.58E−02 | −1.30 | 2.5 |
| hsa-asg-4542 | 4.58 | 3.53 | 4.40 | 0.59 | 0 | 8.62E−03 | −1.29 | 2.4 |
| hsa-asg-8266 | 3.83 | 4.04 | 4.16 | 0.27 | 0 | 5.52E−03 | −1.29 | 2.4 |
| hsa-asg-9848 | 4.18 | 4.65 | 4.31 | 0.42 | 0 | 1.92E−02 | −1.28 | 2.4 |
| hsa-asg-5873 | 5.30 | 4.22 | 5.08 | 0.73 | 25 | 3.37E−02 | −1.28 | 2.4 |
| hsa-asg-7803 | 3.22 | 3.96 | 3.87 | 0.46 | 0 | 3.26E−02 | −1.28 | 2.4 |
| hsa-asg-3038 | 5.15 | 4.65 | 4.99 | 0.25 | 0 | 9.03E−04 | −1.26 | 2.4 |
| hsa-miR-320 | 10.46 | 10.6 | 11.0 | 0.57 | 100 | 5.70E−03 | −1.25 | 2.4 |
| hsa-miR-598 | 5.45 | 4.85 | 5.65 | 0.71 | 25 | 2.39E−02 | −1.25 | 2.4 |
| hsa-miR-30e-5p | 8.15 | 8.76 | 9.11 | 0.89 | 100 | 3.72E−02 | −1.24 | 2.4 |
| hsa-asg-13661 | 4.79 | 5.15 | 5.11 | 0.33 | 0 | 2.54E−02 | −1.23 | 2.4 |
| hsa-let-7e | 11.83 | 10.8 | 11.8 | 0.71 | 100 | 1.65E−02 | −1.20 | 2.3 |
| hsa-asg-1399 | 3.83 | 3.96 | 4.19 | 0.49 | 0 | 7.79E−03 | −1.19 | 2.3 |
| hsa-asg-12403 | 3.91 | 4.48 | 4.66 | 0.58 | 0 | 3.08E−02 | −1.19 | 2.3 |
| hsa-asg-1782 | 3.22 | 2.82 | 3.16 | 0.53 | 0 | 8.92E−03 | −1.18 | 2.3 |
| hsa-asg-8476 | 7.05 | 6.23 | 6.48 | 0.67 | 0 | 1.55E−02 | −1.17 | 2.3 |
| hsa-miR-197 | 8.77 | 7.76 | 8.90 | 0.85 | 100 | 4.57E−02 | −1.17 | 2.2 |
| hsa-miR-24 | 11.95 | 11.8 | 12.4 | 0.60 | 100 | 8.35E−03 | −1.17 | 2.2 |
| hsa-asg-5973 | 4.90 | 4.35 | 4.96 | 0.54 | 25 | 7.81E−03 | −1.15 | 2.2 |
| hsa-asg-5740 | 4.75 | 3.76 | 4.49 | 0.60 | 0 | 1.39E−02 | −1.15 | 2.2 |
| hsa-miR-376a* | 3.83 | 4.08 | 4.44 | 0.58 | 0 | 8.06E−03 | −1.15 | 2.2 |
| hsa-asg-3614 | 3.95 | 4.22 | 4.14 | 0.14 | 0 | 1.59E−02 | −1.14 | 2.2 |
| hsa-miR-641 | 3.50 | 3.27 | 3.34 | 0.12 | 0 | 3.28E−02 | −1.13 | 2.2 |
| hsa-asg-2596 | 3.41 | 4.19 | 4.23 | 0.61 | 0 | 4.48E−02 | −1.12 | 2.2 |
| hsa-asg-2992 | 5.49 | 4.42 | 4.89 | 0.48 | 0 | 2.37E−02 | −1.11 | 2.2 |
| hsa-miR-30a-3p | 7.33 | 7.35 | 7.89 | 0.67 | 100 | 2.91E−02 | −1.11 | 2.2 |
| hsa-asg-3604 | 5.24 | 4.00 | 5.20 | 0.85 | 50 | 4.59E−02 | −1.11 | 2.2 |
| hsa-miR-454-3p | 7.07 | 7.03 | 7.61 | 0.66 | 100 | 2.21E−02 | −1.10 | 2.1 |
| hsa-asg-8737 | 7.61 | 8.06 | 7.78 | 0.19 | 0 | 3.62E−04 | −1.09 | 2.1 |
| hsa-asg-8354 | 3.41 | 3.88 | 3.75 | 0.25 | 0 | 3.16E−02 | −1.07 | 2.1 |
| hsa-asg-12998 | 3.59 | 4.35 | 3.96 | 0.35 | 0 | 2.44E−02 | −1.07 | 2.1 |
| hsa-asg-9815 | 4.86 | 5.36 | 5.36 | 0.37 | 0 | 2.08E−03 | −1.07 | 2.1 |
| hsa-asg-5053 | 5.54 | 4.70 | 5.39 | 0.47 | 50 | 1.12E−02 | −1.06 | 2.1 |
| hsa-asg-13905 | 3.59 | 3.53 | 3.82 | 0.42 | 0 | 4.50E−02 | −1.05 | 2.1 |
| hsa-asg-11397 | 3.76 | 3.48 | 3.61 | 0.25 | 0 | 1.98E−02 | −1.05 | 2.1 |
| hsa-let-7b | 13.0 | 12.3 | 13.3 | 0.82 | 100 | 4.62E−02 | −1.03 | 2.0 |
| hsa-miR-510 | 4.31 | 4.12 | 4.48 | 0.35 | 0 | 1.54E−03 | −1.03 | 2.0 |
| hsa-asg-14015 | 4.88 | 4.54 | 4.89 | 0.33 | 0 | 2.74E−02 | −1.03 | 2.0 |

SD, standard deviation;
%, percentage of samples expressing miRNA above background levels;
Log2 Diff, difference in VSN-transformed expression between NCX and LNneg samples.

### Example 3

### miRNAs Differentially Expressed Between Cancer-positive and Cancer-negative Inguinal Lymph Nodes from Cervical Cancer Patients

[0238] To identify miRNAs that may be useful markers for metastasis of cervical cancer to inguinal lymph nodes, the inventors identified miRNAs that are expressed at significantly higher levels in cancer-positive inguinal lymph nodes from cervical cancer patients than in cancer-negative inguinal lymph nodes.

[0239] miRNA expression was determined for four cancer-positive lymph nodes (LNpos1-4) and four cancer-negative lymph nodes (LNneg1-4) isolated from eight different cervical cancer patients (described in Example 1, Table 3). miRNAs were purified from formalin-fixed, paraffin-embedded (FFPE) lymph nodes as described in Example 1 and analyzed with microarrays as described in Example 2.

[0240] A total of 126 miRNAs (39 verified, 87 predicted) exhibited significant differential expression between cancer-negative lymph nodes (LNneg) and cancer-positive lymph nodes (LNpos), (t-test (LNpos vs LNneg)<0.05 and log 2-Diff (LNpos vs LNneg)≦−1 (Table 5)). Among the verified miRNAs, the average expression level of hsa-miR-205 was more than 1.000-fold lower in LNneg samples than in LNpos samples; the average expression levels of three miRNAs (hsa-miR-203, -200b, and -200a) were between 100- and 1.000-fold lower in LNneg samples; the average expression levels of two miRNAs (hsa-miR-429 and -200c) were between 50- and 100-fold lower in LNneg samples; the average expression levels of six miRNAs (hsa-miR-224, -141, -200a*, -183, -605, and -182) were between 10- and 50-fold lower in LNneg samples; and the average expression levels of eight miRNAs (hsa-miR-9, -493-5p, -9*, -495, -576, -368, -452, and -189) were between 5- and 10-fold lower in LNneg samples than in LNpos samples. Among the 87 predicted miRNAs, the average expression levels of two (hsa-asg-14153_st2, and -7637_st2) were at least 45-fold lower in LNneg samples than in LNpos samples; the average expression levels of two other miRNAs (hsa-asg-2919_st1, and -12227_st1) were between 10- and 45-fold lower in LNneg samples; and the average expression levels of 14 miRNAs (hsa-asg-11715_st2, -11160_st2, -5119_st1, -1296_st1, -10131_st2, -14176_st1, -8174_st1, -2785_st2, -4978_st2, -9198_st1, -8428_st2, -9112_st2, -1596_st2, -12139-st2) were between 5- and 10-fold lower in LNneg samples than in LNpos samples.

TABLE 5
MicroRNAs Differentially Expressed Between Cancer-Positive Inguinal Lymph Node Samples (LNpos) and
Cancer-Negative Inguinal Lymph Node Samples (LNneg).

| | | LNpos | | | | | | | LNneg | |
|---|---|---|---|---|---|---|---|---|---|---|
| Micro RNA | Probe ID | 1 | 2 | 3 | 4 | Mean | SD | % | 1 | 2 |
| hsa-miR-205 | hsa-miR-205_st1 | 13.8 | 13.2 | 13.1 | 13.2 | 13.36 | 0.32 | 100 | 3.61 | 2.06 |
| hsa-miR-203 | hsa-miR-203_st2 | 13.5 | 13.2 | 12.9 | 11.1 | 12.73 | 1.08 | 100 | 4.94 | 5.50 |
| hsa-miR-200b | hsa-miR-200b_st1 | 13.6 | 13.3 | 13.1 | 13.5 | 13.42 | 0.20 | 100 | 6.68 | 7.72 |
| hsa-miR-200a | hsa-miR-200a_st2 | 11.61 | 0.7 | 11.1 | 11.5 | 11.26 | 0.43 | 100 | 4.99 | 5.73 |
| hsa-asg-14153 | hsa-asg-14153_st2 | 9.33 | 8.44 | 8.83 | 9.56 | 9.04 | 0.50 | 100 | 2.97 | 2.65 |
| hsa-miR-429 | hsa-miR-429_st1 | 9.19 | 8.39 | 9.96 | 9.73 | 9.32 | 0.70 | 100 | 3.22 | 3.11 |
| hsa-miR-200c | hsa-miR-200c_st1 | 13.5 | 13.0 | 13.1 | 13.1 | 13.19 | 0.24 | 100 | 7.89 | 8.26 |
| hsa-asg-7637 | hsa-asg-7637_st2 | 9.45 | 8.87 | 9.15 | 9.99 | 9.37 | 0.48 | 100 | 3.51 | 4.37 |
| hsa-miR-224 | hsa-miR-224_st2 | 11.4 | 11.2 | 11.2 | 11.3 | 11.35 | 0.10 | 100 | 7.29 | 8.21 |
| hsa-miR-224 | hsa-asg-14247_st1 | 11.5 | 11.5 | 11.4 | 11.5 | 11.53 | 0.05 | 100 | 7.41 | 8.28 |
| hsa-miR-141 | hsa-miR-141_st1 | 9.72 | 7.99 | 8.86 | 8.55 | 8.78 | 0.72 | 100 | 4.64 | 5.28 |
| hsa-miR-200a* | hsa-miR-200a-_st2 | 8.08 | 6.62 | 7.62 | 7.59 | 7.48 | 0.61 | 100 | 3.16 | 3.47 |
| hsa-miR-183 | hsa-miR-183_st1 | 9.91 | 8.71 | 9.49 | 9.85 | 9.49 | 0.55 | 100 | 6.58 | 5.76 |
| hsa-asg-2919 | hsa-asg-2919_st1 | 8.25 | 6.55 | 6.54 | 5.60 | 6.73 | 1.10 | 75 | 2.97 | 2.45 |
| hsa-asg-12227 | hsa-asg-12227_st1 | 7.19 | 4.29 | 6.50 | 6.63 | 6.15 | 1.28 | 75 | 2.91 | 2.32 |
| hsa-miR-605 | hsa-miR-605_st1 | 6.71 | 5.79 | 6.28 | 6.09 | 6.22 | 0.38 | 75 | 2.25 | 2.85 |
| hsa-miR-182 | hsa-miR-182_st1 | 11.0 | 10.0 | 10.7 | 11.1 | 10.75 | 0.47 | 100 | 8.42 | 8.10 |
| hsa-asg-11715 | hsa-asg-11715_st2 | 6.65 | 6.23 | 5.56 | 5.80 | 6.06 | 0.48 | 100 | 2.78 | 2.85 |
| hsa-asg-11160 | hsa-asg-11160_st2 | 6.27 | 6.04 | 5.55 | 6.04 | 5.97 | 0.30 | 50 | 2.91 | 2.45 |
| hsa-miR-9 | hsa-miR-9_st2 | 4.82 | 6.90 | 6.93 | 7.78 | 6.61 | 1.26 | 75 | 3.77 | 3.78 |
| hsa-miR-9 | hsa-cand90_st2 | 4.51 | 5.52 | 6.10 | 6.83 | 5.74 | 0.98 | 50 | 2.97 | 3.35 |
| hsa-miR-493-5p | hsa-miR-493-5p_st1 | 7.45 | 5.05 | 7.02 | 5.87 | 6.35 | 1.09 | 75 | 3.34 | 4.14 |
| hsa-asg-5119 | hsa-asg-5119_st1 | 6.47 | 5.97 | 5.41 | 5.96 | 5.95 | 0.43 | 75 | 3.34 | 2.45 |
| hsa-asg-1296 | hsa-asg-1296_st1 | 6.98 | 5.46 | 6.61 | 6.48 | 6.38 | 0.65 | 75 | 3.22 | 3.11 |
| hsa-asg-10131 | hsa-asg-10131_st2 | 6.82 | 6.18 | 5.17 | 6.05 | 6.05 | 0.68 | 100 | 2.71 | 3.24 |
| hsa-asg-14176 | hsa-asg-14176_st1 | 9.20 | 6.64 | 5.17 | 7.76 | 7.19 | 1.71 | 75 | 4.76 | 5.47 |
| hsa-asg-8174 | hsa-asg-8174_st1 | 5.95 | 6.61 | 5.79 | 6.41 | 6.19 | 0.39 | 75 | 2.91 | 3.35 |
| hsa-miR-9* | hsa-miR-9-_st2 | 6.19 | 8.00 | 7.59 | 8.60 | 7.60 | 1.02 | 100 | 5.26 | 5.81 |
| hsa-miR-495 | hsa-miR-495_st1 | 6.58 | 4.42 | 6.42 | 5.53 | 5.74 | 1.00 | 50 | 3.22 | 2.72 |
| hsa-miR-576 | hsa-miR-576_st2 | 6.37 | 6.54 | 6.03 | 4.36 | 5.82 | 1.00 | 75 | 2.84 | 2.98 |
| hsa-asg-2785 | hsa-asg-2785_st2 | 5.63 | 6.36 | 8.20 | 6.55 | 6.69 | 1.08 | 50 | 4.12 | 3.47 |
| hsa-asg-4978 | hsa-asg-4978_st2 | 5.30 | 5.93 | 4.58 | 6.04 | 5.46 | 0.67 | 50 | 2.58 | 3.35 |
| hsa-miR-368 | hsa-miR-368_st2 | 7.55 | 4.83 | 7.40 | 6.27 | 6.51 | 1.26 | 75 | 4.35 | 4.22 |
| hsa-asg-9198 | hsa-asg-9198_st1 | 6.12 | 5.34 | 5.37 | 3.31 | 5.03 | 1.20 | 50 | 2.91 | 2.72 |
| hsa-miR-452 | hsa-miR-452_st1 | 7.53 | 7.45 | 7.96 | 7.68 | 7.65 | 0.22 | 100 | 5.64 | 5.36 |
| hsa-asg-8428 | hsa-asg-8428_st2 | 6.56 | 6.21 | 5.76 | 4.30 | 5.71 | 0.99 | 75 | 3.22 | 3.47 |
| hsa-asg-9112 | hsa-asg-9112_st2 | 7.76 | 7.84 | 10.2 | 8.42 | 8.57 | 1.16 | 100 | 6.21 | 5.47 |
| hsa-miR-189 | hsa-miR-189_st1 | 6.90 | 6.61 | 5.94 | 5.71 | 6.29 | 0.56 | 75 | 3.81 | 4.70 |
| hsa-asg-1596 | hsa-asg-1596_st2 | 6.60 | 6.06 | 5.83 | 6.09 | 6.14 | 0.33 | 50 | 4.24 | 3.24 |
| hsa-asg-12139 | hsa-asg-12139_st2 | 5.60 | 6.27 | 4.24 | 5.26 | 5.34 | 0.84 | 25 | 2.97 | 3.35 |
| hsa-miR-422a | hsa-miR-422a_st1 | 10.2 | 9.42 | 10.1 | 9.92 | 9.95 | 0.38 | 100 | 7.31 | 8.59 |
| hsa-miR-96 | hsa-miR-96_st1 | 6.06 | 4.83 | 5.78 | 5.69 | 5.59 | 0.53 | 75 | 3.45 | 3.24 |
| hsa-asg-7471 | hsa-asg-7471_st1 | 8.18 | 8.00 | 7.33 | 7.15 | 7.67 | 0.50 | 100 | 5.32 | 5.84 |
| hsa-asg-10154 | hsa-asg-10154_st1 | 6.07 | 6.89 | 9.12 | 7.24 | 7.33 | 1.29 | 25 | 4.73 | 4.78 |
| hsa-asg-3711 | hsa-asg-3711_st2 | 6.76 | 6.05 | 6.68 | 7.22 | 6.68 | 0.48 | 75 | 4.49 | 4.70 |
| hsa-asg-12729 | hsa-asg-12729_st1 | 7.57 | 7.95 | 10.2 | 8.07 | 8.46 | 1.21 | 100 | 5.93 | 6.27 |
| hsa-asg-11361 | hsa-asg-11361_st2 | 5.58 | 5.64 | 4.95 | 5.20 | 5.34 | 0.33 | 75 | 3.34 | 2.98 |
| hsa-asg-9980 | hsa-asg-9980_st1 | 6.08 | 5.01 | 6.29 | 5.89 | 5.82 | 0.56 | 75 | 2.91 | 4.14 |
| hsa-asg-5021 | hsa-asg-5021_st1 | 6.42 | 3.69 | 5.78 | 5.84 | 5.43 | 1.19 | 50 | 4.04 | 3.24 |
| hsa-miR-27b | hsa-miR-27b_st1 | 13.2 | 12.7 | 12.7 | 12.3 | 12.78 | 0.38 | 100 | 11.2 | 11.4 |
| hsa-miR-199b | hsa-miR-199b_st2 | 9.36 | 7.82 | 9.35 | 8.73 | 8.82 | 0.73 | 100 | 6.16 | 7.61 |
| hsa-asg-924 | hsa-asg-924_st1 | 6.63 | 6.71 | 5.09 | 7.00 | 6.36 | 0.86 | 75 | 5.04 | 3.78 |
| hsa-asg-10247 | hsa-asg-10247_st1 | 5.60 | 4.96 | 5.55 | 5.23 | 5.34 | 0.30 | 25 | 3.10 | 3.11 |
| hsa-asg-3998 | hsa-asg-3998_st1 | 9.84 | 9.03 | 9.74 | 9.59 | 9.55 | 0.36 | 100 | 7.22 | 8.34 |
| hsa-asg-548 | hsa-asg-548_st1 | 5.52 | 5.77 | 4.24 | 5.71 | 5.31 | 0.72 | 25 | 3.45 | 3.88 |
| hsa-miR-561 | hsa-miR-561_st1 | 5.23 | 6.27 | 4.72 | 4.42 | 5.16 | 0.81 | 25 | 3.10 | 3.24 |
| hsa-miR-422b | hsa-miR-422b_st2 | 11.51 | 0.8 | 11.5 | 11.2 | 11.30 | 0.32 | 100 | 9.09 | 10.1 |
| hsa-miR-127 | hsa-miR-127_st1 | 8.40 | 6.92 | 8.04 | 7.67 | 7.76 | 0.63 | 100 | 6.07 | 5.95 |
| hsa-asg-13908 | hsa-asg-13908_st2 | 6.06 | 4.35 | 5.27 | 5.64 | 5.33 | 0.73 | 75 | 2.97 | 3.97 |
| hsa-asg-13705 | hsa-asg-13705_st1 | 5.55 | 4.79 | 5.06 | 5.13 | 5.13 | 0.31 | 25 | 3.10 | 2.72 |
| hsa-asg-12762 | hsa-asg-12762_st2 | 6.53 | 5.72 | 5.71 | 6.36 | 6.08 | 0.43 | 100 | 3.22 | 3.68 |
| hsa-asg-13997 | hsa-asg-13997_st2 | 5.58 | 5.69 | 5.03 | 4.18 | 5.12 | 0.69 | 75 | 2.71 | 3.11 |
| hsa-miR-432 | hsa-miR-432_st2 | 6.50 | 5.01 | 5.73 | 5.71 | 5.74 | 0.61 | 50 | 4.08 | 3.68 |
| hsa-miR-494 | hsa-miR-494_st1 | 7.86 | 7.01 | 7.63 | 7.12 | 7.40 | 0.41 | 100 | 5.33 | 5.47 |
| hsa-miR-494 | hsa-miR61_st2 | 7.17 | 6.45 | 6.89 | 7.21 | 6.93 | 0.35 | 100 | 5.51 | 5.36 |
| hsa-miR154 | hsa-miR154_st1 | 5.95 | 5.82 | 6.74 | 6.02 | 6.13 | 0.41 | 100 | 4.42 | 5.01 |
| hsa-asg-8079 | hsa-asg-8079_st1 | 5.94 | 5.74 | 6.32 | 5.67 | 5.92 | 0.29 | 25 | 3.86 | 3.52 |
| hsa-miR-210 | hsa-miR-210_st1 | 9.60 | 8.95 | 9.02 | 8.90 | 9.12 | 0.33 | 100 | 7.20 | 7.81 |
| hsa-asg-13770 | hsa-asg-13770_st1 | 5.46 | 5.16 | 7.73 | 5.34 | 5.92 | 1.21 | 25 | 3.86 | 4.30 |
| hsa-asg-13254 | hsa-asg-13254_st1 | 6.23 | 3.69 | 6.19 | 5.93 | 5.51 | 1.22 | 75 | 4.45 | 3.47 |
| hsa-asg-54 | hsa-asg-54_st2 | 5.43 | 4.23 | 5.21 | 4.85 | 4.93 | 0.52 | 25 | 2.51 | 2.85 |
| hsa-asg-2967 | hsa-asg-2967_st2 | 5.84 | 5.46 | 5.19 | 5.02 | 5.38 | 0.36 | 50 | 3.56 | 4.06 |
| hsa-asg-128 | hsa-asg-128_st2 | 6.02 | 4.88 | 5.70 | 4.81 | 5.35 | 0.60 | 25 | 2.78 | 4.37 |
| hsa-cand271 | hsa-cand271_st2 | 4.91 | 5.14 | 6.69 | 5.64 | 5.60 | 0.79 | 25 | 4.28 | 2.85 |
| hsa-asg-14146 | hsa-asg-14146_st1 | 5.71 | 5.58 | 5.97 | 7.96 | 6.31 | 1.12 | 75 | 4.73 | 5.32 |
| hsa-miR-376a | hsa-miR-376a_st2 | 6.19 | 4.53 | 5.63 | 4.98 | 5.33 | 0.73 | 50 | 3.67 | 3.97 |
| hsa-asg-9723 | hsa-asg-9723_st2 | 5.33 | 5.16 | 4.54 | 3.90 | 4.73 | 0.65 | 50 | 2.84 | 3.24 |
| hsa-asg-11969 | hsa-asg-11969_st1 | 8.17 | 7.19 | 7.31 | 7.71 | 7.59 | 0.44 | 100 | 5.76 | 5.65 |
| hsa-asg-10577 | hsa-asg-10577_st1 | 7.00 | 7.04 | 8.97 | 7.43 | 7.61 | 0.93 | 100 | 5.90 | 6.02 |
| hsa-asg-5998 | hsa-asg-5998_st1 | 6.31 | 6.45 | 8.44 | 6.61 | 6.95 | 1.00 | 75 | 5.30 | 5.17 |
| hsa-miR-34b | hsa-miR-34b_st2 | 5.91 | 6.43 | 5.49 | 6.39 | 6.06 | 0.45 | 100 | 5.04 | 4.44 |
| hsa-asg-8450 | hsa-asg-8450_st1 | 6.77 | 5.96 | 6.82 | 6.71 | 6.56 | 0.40 | 75 | 4.99 | 4.44 |
| hsa-asg-8266 | hsa-asg-8266_st2 | 6.21 | 6.27 | 4.96 | 5.42 | 5.71 | 0.63 | 50 | 4.31 | 4.44 |
| hsa-cand138 | hsa-cand138_st1 | 4.39 | 3.78 | 6.19 | 3.49 | 4.46 | 1.21 | 25 | 2.91 | 2.85 |
| hsa-asg-9405 | hsa-asg-9405_st1 | 6.69 | 7.03 | 8.05 | 6.61 | 7.10 | 0.66 | 100 | 5.39 | 5.60 |
| hsa-miR-299-5p | hsa-miR-299-5p_st2 | 6.12 | 3.94 | 4.85 | 4.67 | 4.90 | 0.90 | 25 | 4.04 | 3.47 |
| hsa-asg-1929 | hsa-asg-1929_st1 | 4.27 | 4.23 | 4.69 | 4.58 | 4.44 | 0.23 | 25 | 3.34 | 3.11 |
| hsa-asg-9702 | hsa-asg-9702_st2 | 5.04 | 4.16 | 5.34 | 3.97 | 4.63 | 0.66 | 25 | 3.22 | 3.24 |
| hsa-asg-7033 | hsa-asg-7033_st1 | 6.37 | 6.18 | 6.85 | 5.73 | 6.28 | 0.46 | 100 | 4.87 | 4.44 |
| hsa-miR-130b | hsa-miR-130b_st1 | 9.33 | 9.00 | 9.68 | 9.65 | 9.41 | 0.32 | 100 | 8.39 | 8.14 |
| hsa-miR-27a | hsa-miR-27a_st2 | 11.7 | 11.0 | 11.3 | 10.9 | 11.28 | 0.34 | 100 | 10.4 | 10.7 |
| hsa-asg-9186 | hsa-asg-9186_st1 | 5.66 | 5.65 | 7.32 | 5.73 | 6.09 | 0.82 | 25 | 4.67 | 4.51 |
| hsa-asg-1399 | hsa-asg-1399_st1 | 5.99 | 6.27 | 4.40 | 5.61 | 5.57 | 0.82 | 25 | 4.92 | 4.06 |
| hsa-asg-11381 | hsa-asg-11381_st2 | 6.23 | 6.74 | 6.65 | 7.01 | 6.66 | 0.32 | 100 | 4.87 | 5.06 |
| hsa-miR-31 | hsa-miR-31_st2 | 11.9 | 12.3 | 11.2 | 12.0 | 11.90 | 0.44 | 100 | 11.3 | 10.1 |
| hsa-asg-6180 | hsa-asg-6180_st1 | 7.13 | 7.25 | 7.83 | 7.78 | 7.50 | 0.36 | 100 | 6.63 | 6.14 |
| hsa-asg-3383 | hsa-asg-3383_st1 | 7.70 | 7.68 | 9.30 | 7.98 | 8.16 | 0.77 | 100 | 6.75 | 6.90 |
| hsa-asg-13258 | hsa-asg-13258_st2 | 9.27 | 7.83 | 8.31 | 9.06 | 8.62 | 0.67 | 100 | 7.64 | 8.26 |
| hsa-asg-11877 | hsa-asg-11877_st1 | 5.11 | 5.03 | 6.26 | 5.13 | 5.38 | 0.59 | 25 | 4.20 | 3.78 |
| hsa-asg-14048 | hsa-asg-14048_st1 | 5.69 | 5.40 | 5.50 | 5.26 | 5.46 | 0.18 | 25 | 4.58 | 4.06 |
| hsa-asg-14233 | hsa-asg-14233_st1 | 9.98 | 9.59 | 9.55 | 9.17 | 9.57 | 0.33 | 100 | 8.28 | 8.80 |
| hsa-asg-3884 | hsa-asg-3884_st1 | 5.66 | 4.74 | 5.43 | 5.97 | 5.45 | 0.52 | 25 | 3.95 | 3.47 |
| hsa-miR-382 | hsa-miR-382_st1 | 7.88 | 6.12 | 7.35 | 7.39 | 7.19 | 0.75 | 75 | 6.24 | 6.05 |
| hsa-asg-6788 | hsa-asg-6788_st1 | 7.11 | 6.75 | 8.38 | 6.47 | 7.18 | 0.84 | 75 | 5.93 | 5.32 |
| hsa-asg-14237 | hsa-asg-14237_st2 | 7.77 | 6.85 | 7.11 | 6.59 | 7.08 | 0.51 | 100 | 6.23 | 5.84 |
| hsa-asg-14177 | hsa-asg-14177_st1 | 3.99 | 4.02 | 5.03 | 3.01 | 4.01 | 0.82 | 25 | 2.71 | 2.59 |
| hsa-miR-134 | hsa-miR-134_st2 | 6.32 | 5.07 | 6.07 | 5.33 | 5.70 | 0.59 | 25 | 4.79 | 4.51 |
| hsa-asg-14137 | hsa-asg-14137_st1 | 6.27 | 6.42 | 7.33 | 6.77 | 6.70 | 0.47 | 100 | 5.50 | 4.64 |
| hsa-asg-4223 | hsa-asg-4223_st2 | 8.26 | 7.96 | 8.54 | 8.73 | 8.37 | 0.33 | 100 | 7.90 | 7.13 |
| hsa-asg-6341 | hsa-asg-6341_st2 | 9.67 | 9.12 | 10.2 | 9.78 | 9.70 | 0.45 | 100 | 8.86 | 8.14 |
| hsa-asg-13205 | hsa-asg-13205_st1 | 6.94 | 6.19 | 6.92 | 5.26 | 6.33 | 0.79 | 75 | 5.24 | 5.76 |
| hsa-asg-9729 | hsa-asg-9729_st2 | 7.16 | 6.74 | 5.90 | 6.83 | 6.66 | 0.53 | 100 | 5.94 | 6.00 |
| hsa-asg-13278 | hsa-asg-13278_st2 | 10.1 | 9.60 | 10.0 | 9.99 | 9.95 | 0.25 | 100 | 9.36 | 8.71 |
| hsa-asg-10199 | hsa-asg-10199_st1 | 6.66 | 5.72 | 7.14 | 6.48 | 6.50 | 0.59 | 50 | 5.33 | 5.34 |
| hsa-asg-9126 | hsa-asg-9126_st2 | 5.84 | 5.35 | 6.53 | 5.23 | 5.74 | 0.59 | 25 | 4.42 | 4.51 |
| hsa-asg-7568 | hsa-asg-7568_st1 | 6.78 | 6.40 | 6.91 | 6.76 | 6.71 | 0.22 | 75 | 6.03 | 4.84 |
| hsa-asg-13841 | hsa-asg-13841 _st2 | 7.08 | 6.79 | 7.12 | 7.08 | 7.02 | 0.15 | 100 | 6.21 | 5.36 |
| hsa-asg-11285 | hsa-asg-11285_st2 | 5.79 | 5.91 | 4.69 | 4.30 | 5.17 | 0.80 | 50 | 4.49 | 4.06 |
| hsa-asg-4339 | hsa-asg-4339_st2 | 6.88 | 5.83 | 6.78 | 6.89 | 6.60 | 0.51 | 75 | 5.98 | 5.11 |
| hsa-asg-12146 | hsa-asg-12146_st2 | 6.17 | 5.84 | 5.88 | 5.60 | 5.87 | 0.23 | 25 | 4.49 | 5.04 |
| hsa-asg-9146 | hsa-asg-9146_st1 | 8.69 | 8.67 | 9.55 | 8.96 | 8.97 | 0.41 | 25 | 8.13 | 7.55 |
| hsa-asg-12376 | hsa-asg-12376_st2 | 5.76 | 5.55 | 6.92 | 5.98 | 6.05 | 0.60 | 25 | 4.87 | 4.37 |
| hsa-asg-542 | hsa-asg-542_st1 | 8.14 | 8.20 | 9.29 | 8.11 | 8.44 | 0.57 | 100 | 7.65 | 6.89 |
| hsa-asg-8003 | hsa-asg-8003_st2 | 6.50 | 6.89 | 7.09 | 6.77 | 6.81 | 0.25 | 100 | 5.35 | 6.00 |
| hsa-asg-9227 | hsa-asg-9227_st1 | 7.18 | 6.96 | 8.42 | 6.70 | 7.31 | 0.76 | 100 | 6.47 | 6.21 |
| hsa-cand720 | hsa-cand720_st1 | 6.58 | 5.86 | 6.29 | 5.82 | 6.14 | 0.36 | 50 | 4.79 | 5.83 |
| hsa-asg-2858 | hsa-asg-2858_st1 | 7.10 | 6.58 | 6.93 | 7.23 | 6.96 | 0.28 | 100 | 6.14 | 5.24 |
| hsa-miR-93 | hsa-miR-93_st2 | 11.41 | 1.11 | 1.21 | 1.01 | 1.22 | 0.17 | 100 | 10.6 | 10.5 |
| hsa-asg-3631 | hsa-asg-3631_st1 | 7.76 | 7.83 | 8.31 | 7.50 | 7.85 | 0.34 | 75 | 6.63 | 6.86 |

| | | | | | | LNneg vs LNpos | | |
|---|---|---|---|---|---|---|---|---|
| | LNneg | | | | | | Log2 | Fold |
| Micro RNA | 3 | 4 | Mean | SD | % | Ttest | Diff | change |
| hsa-miR-205 | 2.65 | 3.57 | 2.98 | 0.75 | 0 | 2.48E−07 | −10.38 | 1332 |
| hsa-miR-203 | 3.59 | 4.15 | 4.55 | 0.84 | 0 | 2.12E−05 | −8.18 | 290.1 |
| hsa-miR-200b | 5.92 | 6.17 | 6.62 | 0.80 | 100 | 3.11E−06 | −6.80 | 111.6 |
| hsa-miR-200a | 3.83 | 3.48 | 4.51 | 1.04 | 25 | 2.01E−05 | −6.76 | 108.1 |
| hsa-asg-14153 | 2.71 | 2.59 | 2.73 | 0.17 | 0 | 3.59E−07 | −6.31 | 79.2 |
| hsa-miR-429 | 3.59 | 3.38 | 3.33 | 0.21 | 0 | 3.19E−06 | −5.99 | 63.7 |
| hsa-miR-200c | 7.04 | 6.42 | 7.40 | 0.83 | 100 | 1.08E−05 | −5.79 | 55.3 |
| hsa-asg-7637 | 4.09 | 3.05 | 3.75 | 0.59 | 0 | 6.02E−06 | −5.61 | 48.9 |
| hsa-miR-224 | 5.67 | 5.82 | 6.75 | 1.22 | 50 | 2.89E−04 | −4.60 | 24.3 |
| hsa-miR-224 | 5.81 | 6.49 | 7.00 | 1.08 | 100 | 1.55E−04 | −4.54 | 23.2 |
| hsa-miR-141 | 4.12 | 3.88 | 4.48 | 0.62 | 0 | 1.03E−04 | −4.30 | 19.7 |
| hsa-miR-200a* | 3.67 | 2.77 | 3.27 | 0.40 | 0 | 2.54E−05 | −4.21 | 18.5 |
| hsa-miR-183 | 4.31 | 5.77 | 5.60 | 0.95 | 25 | 3.96E−04 | −3.88 | 14.8 |
| hsa-asg-2919 | 3.50 | 2.71 | 2.91 | 0.45 | 0 | 6.72E−04 | −3.82 | 14.2 |
| hsa-asg-12227 | 2.12 | 2.35 | 2.43 | 0.34 | 0 | 1.33E−03 | −3.73 | 13.2 |
| hsa-miR-605 | 3.02 | 2.53 | 2.66 | 0.34 | 0 | 8.95E−06 | −3.55 | 11.7 |
| hsa-miR-182 | 5.76 | 7.23 | 7.38 | 1.19 | 100 | 1.87E−03 | −3.37 | 10.3 |
| hsa-asg-11715 | 3.22 | 2.18 | 2.76 | 0.43 | 0 | 5.11E−05 | −3.30 | 9.9 |
| hsa-asg-11160 | 2.87 | 2.71 | 2.73 | 0.21 | 0 | 2.02E−06 | −3.24 | 9.4 |
| hsa-miR-9 | 2.60 | 3.92 | 3.52 | 0.62 | 0 | 4.55E−03 | −3.09 | 8.5 |
| hsa-miR-9 | 3.12 | 3.16 | 3.15 | 0.16 | 0 | 1.97E−03 | −2.59 | 6.0 |
| hsa-miR-493-5p | 2.38 | 3.27 | 3.28 | 0.72 | 0 | 3.39E−03 | −3.06 | 8.4 |
| hsa-asg-5119 | 3.59 | 2.24 | 2.90 | 0.66 | 0 | 2.49E−04 | −3.05 | 8.3 |
| hsa-asg-1296 | 4.12 | 2.94 | 3.35 | 0.53 | 0 | 3.46E−04 | −3.03 | 8.2 |
| hsa-asg-10131 | 3.50 | 2.71 | 3.04 | 0.40 | 0 | 2.59E−04 | −3.01 | 8.1 |
| hsa-asg-14176 | 4.22 | 2.59 | 4.26 | 1.22 | 0 | 3.15E−02 | −2.94 | 7.6 |
| hsa-asg-8174 | 3.98 | 2.88 | 3.28 | 0.51 | 0 | 1.03E−04 | −2.91 | 7.5 |
| hsa-miR-9* | 4.37 | 4.00 | 4.86 | 0.83 | 25 | 5.95E−03 | −2.74 | 6.7 |
| hsa-miR-495 | 3.12 | 2.94 | 3.00 | 0.22 | 0 | 1.72E−03 | −2.74 | 6.7 |
| hsa-miR-576 | 3.02 | 3.57 | 3.11 | 0.32 | 0 | 2.06E−03 | −2.72 | 6.6 |
| hsa-asg-2785 | 4.31 | 4.00 | 3.98 | 0.36 | 0 | 3.16E−03 | −2.71 | 6.5 |
| hsa-asg-4978 | 2.28 | 2.82 | 2.76 | 0.46 | 0 | 5.61E−04 | −2.70 | 6.5 |
| hsa-miR-368 | 3.32 | 3.48 | 3.84 | 0.52 | 0 | 7.76E−03 | −2.67 | 6.4 |
| hsa-asg-9198 | 1.97 | 1.96 | 2.39 | 0.50 | 0 | 6.65E−03 | −2.65 | 6.3 |
| hsa-miR-452 | 3.67 | 5.36 | 5.01 | 0.90 | 0 | 1.26E−03 | −2.64 | 6.2 |
| hsa-asg-8428 | 3.02 | 2.94 | 3.16 | 0.24 | 0 | 2.49E−03 | −2.54 | 5.8 |
| hsa-asg-9112 | 6.29 | 6.41 | 6.09 | 0.42 | 50 | 6.97E−03 | −2.47 | 5.6 |
| hsa-miR-189 | 3.17 | 3.67 | 3.84 | 0.63 | 0 | 1.15E−03 | −2.45 | 5.5 |
| hsa-asg-1596 | 3.87 | 3.48 | 3.71 | 0.44 | 0 | 1.13E−04 | −2.44 | 5.4 |
| hsa-asg-12139 | 2.81 | 2.94 | 3.02 | 0.23 | 0 | 1.81E−03 | −2.32 | 5.0 |
| hsa-miR-422a | 7.20 | 7.59 | 7.67 | 0.63 | 100 | 8.43E−04 | −2.28 | 4.8 |
| hsa-miR-96 | 3.32 | 3.27 | 3.32 | 0.09 | 0 | 1.49E−04 | −2.27 | 4.8 |
| hsa-asg-7471 | 5.42 | 5.05 | 5.41 | 0.33 | 0 | 2.89E−04 | −2.26 | 4.8 |
| hsa-asg-10154 | 5.13 | 5.64 | 5.07 | 0.42 | 0 | 1.58E−02 | −2.26 | 4.8 |
| hsa-asg-3711 | 4.25 | 4.35 | 4.45 | 0.19 | 0 | 1.36E−04 | −2.23 | 4.7 |
| hsa-asg-12729 | 6.26 | 6.49 | 6.24 | 0.23 | 75 | 1.12E−02 | −2.22 | 4.7 |
| hsa-asg-11361 | 2.92 | 3.27 | 3.13 | 0.21 | 0 | 2.71E−05 | −2.21 | 4.6 |
| hsa-asg-9980 | 3.59 | 4.04 | 3.67 | 0.56 | 0 | 1.67E−03 | −2.15 | 4.4 |
| hsa-asg-5021 | 3.12 | 2.82 | 3.31 | 0.52 | 0 | 1.71E−02 | −2.13 | 4.4 |
| hsa-miR-27b | 10.4 | 9.46 | 10.6 | 0.91 | 100 | 5.10E−03 | −2.11 | 4.3 |
| hsa-miR-199b | 6.54 | 6.50 | 6.71 | 0.63 | 100 | 4.63E−03 | −2.11 | 4.3 |
| hsa-asg-924 | 4.18 | 4.00 | 4.25 | 0.55 | 0 | 6.20E−03 | −2.10 | 4.3 |
| hsa-asg-10247 | 3.59 | 3.16 | 3.24 | 0.23 | 0 | 3.30E−05 | −2.10 | 4.3 |
| hsa-asg-3998 | 7.10 | 7.17 | 7.46 | 0.59 | 100 | 9.28E−04 | −2.09 | 4.3 |
| hsa-asg-548 | 2.71 | 2.94 | 3.25 | 0.53 | 0 | 3.54E−03 | −2.07 | 4.2 |
| hsa-miR-561 | 3.22 | 2.82 | 3.10 | 0.19 | 0 | 2.59E−03 | −2.06 | 4.2 |
| hsa-miR-422b | 8.75 | 9.17 | 9.28 | 0.58 | 100 | 9.07E−04 | −2.02 | 4.1 |
| hsa-miR-127 | 5.48 | 5.52 | 5.76 | 0.30 | 25 | 1.24E−03 | −2.00 | 4.0 |
| hsa-asg-13908 | 3.32 | 3.05 | 3.33 | 0.45 | 0 | 3.41E−03 | −2.00 | 4.0 |
| hsa-asg-13705 | 3.98 | 2.94 | 3.19 | 0.55 | 0 | 8.76E−04 | −1.94 | 3.8 |
| hsa-asg-12762 | 4.73 | 4.94 | 4.14 | 0.82 | 0 | 5.88E−03 | −1.94 | 3.8 |
| hsa-asg-13997 | 3.67 | 3.27 | 3.19 | 0.40 | 0 | 2.90E−03 | −1.93 | 3.8 |
| hsa-miR-432 | 2.81 | 4.67 | 3.81 | 0.78 | 0 | 8.09E−03 | −1.92 | 3.8 |
| hsa-miR-494 | 5.10 | 6.09 | 5.50 | 0.43 | 50 | 6.35E−04 | −1.91 | 3.8 |
| hsa-miR-494 | 5.74 | 6.05 | 5.67 | 0.30 | 75 | 1.56E−03 | −1.27 | 2.4 |
| hsa-miR154 | 3.67 | 3.84 | 4.24 | 0.61 | 0 | 2.13E−03 | −1.89 | 3.7 |
| hsa-asg-8079 | 4.15 | 4.59 | 4.03 | 0.45 | 0 | 4.20E−04 | −1.89 | 3.7 |
| hsa-miR-210 | 6.58 | 7.37 | 7.24 | 0.51 | 100 | 8.09E−04 | −1.88 | 3.7 |
| hsa-asg-13770 | 4.12 | 3.92 | 4.05 | 0.20 | 0 | 2.25E−02 | −1.87 | 3.7 |
| hsa-asg-13254 | 3.76 | 3.11 | 3.70 | 0.57 | 0 | 3.57E−02 | −1.81 | 3.5 |
| hsa-asg-54 | 3.91 | 3.22 | 3.12 | 0.60 | 0 | 3.93E−03 | −1.80 | 3.5 |
| hsa-asg-2967 | 3.22 | 3.67 | 3.63 | 0.34 | 0 | 4.06E−04 | −1.75 | 3.4 |
| hsa-asg-128 | 3.67 | 3.62 | 3.61 | 0.65 | 0 | 7.73E−03 | −1.74 | 3.3 |
| hsa-cand271 | 4.18 | 4.22 | 3.88 | 0.69 | 0 | 1.72E−02 | −1.71 | 3.3 |
| hsa-asg-14146 | 4.63 | 3.92 | 4.65 | 0.57 | 0 | 3.85E−02 | −1.66 | 3.1 |
| hsa-miR-376a | 3.83 | 3.27 | 3.69 | 0.30 | 0 | 5.92E−03 | −1.65 | 3.1 |
| hsa-asg-9723 | 3.59 | 2.71 | 3.09 | 0.40 | 0 | 5.14E−03 | −1.64 | 3.1 |
| hsa-asg-11969 | 6.01 | 6.42 | 5.96 | 0.34 | 25 | 1.11E−03 | −1.63 | 3.1 |
| hsa-asg-10577 | 5.94 | 6.09 | 5.99 | 0.09 | 50 | 1.31E−02 | −1.62 | 3.1 |
| hsa-asg-5998 | 5.41 | 5.49 | 5.34 | 0.14 | 0 | 1.88E−02 | −1.61 | 3.1 |
| hsa-miR-34b | 5.10 | 3.27 | 4.46 | 0.85 | 0 | 1.58E−02 | −1.59 | 3.0 |
| hsa-asg-8450 | 5.48 | 5.07 | 4.99 | 0.43 | 0 | 1.75E−03 | −1.57 | 3.0 |
| hsa-asg-8266 | 3.83 | 4.04 | 4.16 | 0.27 | 0 | 4.08E−03 | −1.56 | 2.9 |
| hsa-cand138 | 2.60 | 3.32 | 2.92 | 0.30 | 0 | 4.81E−02 | −1.54 | 2.9 |
| hsa-asg-9405 | 5.58 | 5.75 | 5.58 | 0.15 | 0 | 4.22E−03 | −1.52 | 2.9 |
| hsa-miR-299-5p | 2.71 | 3.38 | 3.40 | 0.55 | 0 | 2.97E−02 | −1.50 | 2.8 |
| hsa-asg-1929 | 2.49 | 2.82 | 2.94 | 0.37 | 0 | 4.43E−04 | −1.50 | 2.8 |
| hsa-asg-9702 | 3.41 | 2.71 | 3.14 | 0.30 | 0 | 6.62E−03 | −1.48 | 2.8 |
| hsa-asg-7033 | 5.10 | 4.82 | 4.81 | 0.27 | 0 | 1.52E−03 | −1.48 | 2.8 |
| hsa-miR-130b | 7.53 | 7.73 | 7.95 | 0.39 | 100 | 1.14E−03 | −1.46 | 2.8 |
| hsa-miR-27a | 9.25 | 8.77 | 9.82 | 0.96 | 100 | 2.88E−02 | −1.46 | 2.8 |
| hsa-asg-9186 | 4.77 | 4.80 | 4.69 | 0.13 | 0 | 1.50E−02 | −1.40 | 2.6 |
| hsa-asg-1399 | 3.83 | 3.96 | 4.19 | 0.49 | 0 | 2.87E−02 | −1.37 | 2.6 |
| hsa-asg-11381 | 5.59 | 5.65 | 5.29 | 0.39 | 0 | 1.64E−03 | −1.37 | 2.6 |
| hsa-miR-31 | 9.90 | 10.76 | 10.5 | 0.64 | 100 | 1.30E−02 | −1.35 | 2.6 |
| hsa-asg-6180 | 5.72 | 6.13 | 6.15 | 0.37 | 75 | 2.08E−03 | −1.34 | 2.5 |
| hsa-asg-3383 | 7.09 | 6.59 | 6.83 | 0.21 | 100 | 1.56E−02 | −1.33 | 2.5 |
| hsa-asg-13258 | 6.41 | 7.00 | 7.33 | 0.80 | 100 | 4.76E−02 | −1.29 | 2.5 |
| hsa-asg-11877 | 4.12 | 4.29 | 4.10 | 0.22 | 0 | 6.37E−03 | −1.28 | 2.4 |
| hsa-asg-14048 | 3.59 | 4.51 | 4.18 | 0.46 | 0 | 2.02E−03 | −1.28 | 2.4 |
| hsa-asg-14233 | 8.59 | 7.53 | 8.30 | 0.56 | 100 | 7.84E−03 | −1.27 | 2.4 |
| hsa-asg-3884 | 5.24 | 4.08 | 4.18 | 0.75 | 0 | 3.24E−02 | −1.26 | 2.4 |
| hsa-miR-382 | 5.08 | 6.41 | 5.94 | 0.59 | 25 | 4.10E−02 | −1.24 | 2.4 |
| hsa-asg-6788 | 5.96 | 6.55 | 5.94 | 0.50 | 25 | 4.53E−02 | −1.24 | 2.4 |
| hsa-asg-14237 | 6.30 | 5.07 | 5.86 | 0.57 | 75 | 1.83E−02 | −1.22 | 2.3 |
| hsa-asg-14177 | 2.60 | 3.27 | 2.79 | 0.32 | 0 | 3.33E−02 | −1.22 | 2.3 |
| hsa-miR-134 | 4.42 | 4.22 | 4.49 | 0.23 | 0 | 9.10E−03 | −1.21 | 2.3 |
| hsa-asg-14137 | 5.82 | 6.05 | 5.50 | 0.62 | 0 | 2.21E−02 | −1.19 | 2.3 |
| hsa-asg-4223 | 7.69 | 6.01 | 7.18 | 0.85 | 50 | 4.00E−02 | −1.19 | 2.3 |
| hsa-asg-6341 | 8.71 | 8.32 | 8.51 | 0.33 | 25 | 5.56E−03 | −1.19 | 2.3 |
| hsa-asg-13205 | 4.92 | 4.70 | 5.15 | 0.46 | 0 | 4.23E−02 | −1.18 | 2.3 |
| hsa-asg-9729 | 5.10 | 4.92 | 5.49 | 0.56 | 0 | 2.36E−02 | −1.17 | 2.2 |
| hsa-asg-13278 | 8.90 | 8.17 | 8.79 | 0.49 | 50 | 5.57E−03 | −1.16 | 2.2 |
| hsa-asg-10199 | 5.18 | 5.49 | 5.34 | 0.13 | 0 | 8.53E−03 | −1.16 | 2.2 |
| hsa-asg-9126 | 4.37 | 5.02 | 4.58 | 0.30 | 0 | 1.29E−02 | −1.16 | 2.2 |
| hsa-asg-7568 | 6.14 | 5.22 | 5.56 | 0.63 | 25 | 1.34E−02 | −1.16 | 2.2 |
| hsa-asg-13841 | 6.93 | 4.98 | 5.87 | 0.87 | 25 | 4.10E−02 | −1.15 | 2.2 |
| hsa-asg-11285 | 3.98 | 3.67 | 4.05 | 0.34 | 0 | 4.15E−02 | −1.12 | 2.2 |
| hsa-asg-4339 | 5.64 | 5.22 | 5.49 | 0.40 | 0 | 1.45E−02 | −1.11 | 2.2 |
| hsa-asg-12146 | 4.34 | 5.33 | 4.80 | 0.46 | 0 | 6.12E−03 | −1.07 | 2.1 |
| hsa-asg-9146 | 8.05 | 7.91 | 7.91 | 0.26 | 0 | 4.67E−03 | −1.06 | 2.1 |
| hsa-asg-12376 | 5.41 | 5.33 | 4.99 | 0.48 | 0 | 3.33E−02 | −1.06 | 2.1 |
| hsa-asg-542 | 7.32 | 7.66 | 7.38 | 0.36 | 100 | 2.06E−02 | −1.06 | 2.1 |
| hsa-asg-8003 | 5.95 | 5.72 | 5.76 | 0.29 | 0 | 1.56E−03 | −1.06 | 2.1 |
| hsa-asg-9227 | 6.23 | 6.17 | 6.27 | 0.14 | 75 | 3.59E−02 | −1.04 | 2.1 |
| hsa-cand720 | 5.35 | 4.48 | 5.11 | 0.60 | 0 | 2.64E−02 | −1.03 | 2.0 |
| hsa-asg-2858 | 5.67 | 6.69 | 5.93 | 0.63 | 25 | 2.46E−02 | −1.02 | 2.0 |
| hsa-miR-93 | 9.68 | 9.94 | 10.2 | 0.46 | 100 | 5.74E−03 | −1.02 | 2.0 |
| hsa-asg-3631 | 6.60 | 7.23 | 6.83 | 0.29 | 0 | 3.82E−03 | −1.02 | 2.0 |

SD, standard deviation;
%, percentage of samples expressing miRNA above background levels;
Log2 Diff, difference in VSN-transformed expression between LNpos and LNneg samples.

### Example 4

### Common miRNAs Differentially Expressed Between Normal Cervix Samples And Cancer-negative Inguinal Lymph Nodes and Between Cancer-positive and Cancer-negative Inguinal Lymph Nodes

[0241] The inventors determined the common miRNAs that are differentially expressed between normal cervix (NCX) samples and cancer-negative inguinal lymph nodes (LNneg) and between cancer-positive (LNpos) and cancer-negative (LNneg) inguinal lymph nodes. For this analysis, differentially expressed miRNAs were identified as having a p-value <0.05 and fold-change>2. These miRNAs represent particularly useful biomarkers for monitoring cervical cancer metastasis to inguinal lymph nodes.

[0242] The inventors found a total of 71 miRNAs to be differentially expressed between both NCX and LNneg samples and between LNpos and LNneg sample (Table 6.). Among these, the average expression levels of 26 miRNAs were at least 5-fold lower in LNneg samples than their average expression levels in either LNpos samples or NCX samples, corresponding to 18 verified miRNAs (hsa-miR-182, -183, -189, -200a, -200a*, -200b, -200c, -203, -205, -224, -368, -429, -452, -493-5p, -495, -605, -9, and -9*) and 8 predicted miRNAs (hsa-asg-8174_st1, -7637_st2, -14176_st1, -14153_st2, -1296_st1, -12227_st1, -11715_st2, and -10131_st2).

TABLE 6
miRNAs differentially expressed between both normal cervix
samples and cancer-negative inguinal lymph nodes and between
cancer-positive and cancer-negative inguinal lymph nodes.

| | Fold Change | Fold Change |
|---|---|---|
| miR Name | NCX vs LNneg | LNpos vs LNneg |
| hsa-miR-205 | 413.8 | 1332.5 |
| hsa-miR-368 | 187.2 | 6.4 |
| hsa-miR-203 | 171.5 | 290.1 |
| hsa-miR-495 | 138.2 | 6.7 |
| hsa-asg-5021 | 97.3 | 4.4 |
| hsa-miR-200a | 80.6 | 108.1 |
| hsa-miR-299-5p | 78.3 | 2.8 |
| hsa-miR-493-5p | 76.2 | 8.4 |
| hsa-asg-13254 | 72.2 | 3.5 |
| hsa-miR-200b | 64.3 | 111.6 |
| hsa-miR-200c | 53.7 | 55.3 |
| hsa-miR-127 | 50.0 | 4.0 |
| hsa-miR-432 | 49.9 | 3.8 |
| hsa-asg-14153 | 42.2 | 79.2 |
| hsa-asg-14176 | 32.1 | 7.6 |
| hsa-miR-199b | 26.1 | 4.3 |
| hsa-miR-134 | 25.3 | 2.3 |
| hsa-miR-376a | 24.9 | 3.1 |
| hsa-asg-7637 | 24.3 | 48.9 |
| hsa-miR-189 | 24.1 | 5.5 |
| hsa-miR-429 | 23.7 | 63.7 |
| hsa-miR-494 | 20.8 | 3.8 |
| hsa-miR-224 | 17.7 | 24.3 |
| hsa-miR-382 | 17.4 | 2.4 |
| hsa-miR-9* | 14.9 | 6.7 |
| hsa-miR-9 | 12.4 | 8.5 |
| hsa-miR-452 | 12.2 | 6.2 |
| hsa-miR-605 | 10.6 | 11.7 |
| hsa-asg-10131 | 8.3 | 8.1 |
| hsa-miR-27b | 8.2 | 4.3 |
| hsa-miR-200a* | 7.6 | 18.5 |
| hsa-miR-183 | 7.6 | 14.8 |
| hsa-miR154 | 7.4 | 3.7 |
| hsa-asg-1296 | 7.3 | 8.2 |
| hsa-miR-182 | 7.1 | 10.3 |
| hsa-asg-7471 | 6.9 | 4.8 |
| hsa-asg-13205 | 6.6 | 2.3 |
| hsa-asg-12227 | 6.4 | 13.2 |
| hsa-asg-11715 | 5.5 | 9.9 |
| hsa-asg-924 | 5.3 | 4.3 |
| hsa-asg-14233 | 5.3 | 2.4 |
| hsa-miR-27a | 5.3 | 2.8 |
| hsa-asg-8174 | 5.2 | 7.5 |
| hsa-asg-14146 | 5.0 | 3.1 |
| hsa-asg-1596 | 4.7 | 5.4 |
| hsa-asg-9980 | 4.2 | 4.4 |
| hsa-asg-9198 | 4.2 | 6.3 |
| hsa-asg-12139 | 4.2 | 5.0 |
| hsa-asg-13705 | 4.1 | 3.8 |
| hsa-miR-576 | 4.1 | 6.6 |
| hsa-asg-11361 | 4.0 | 4.6 |
| hsa-miR-34b | 4.0 | 3.0 |
| hsa-asg-13258 | 3.9 | 2.5 |
| hsa-asg-13997 | 3.8 | 2.3 |
| hsa-asg-10247 | 3.8 | 4.3 |
| hsa-asg-8428 | 3.5 | 5.8 |
| hsa-asg-2967 | 3.4 | 3.4 |
| hsa-miR-422a | 3.4 | 4.8 |
| hsa-asg-548 | 3.2 | 4.2 |
| hsa-miR-561 | 3.2 | 4.2 |
| hsa-miR-422b | 3.2 | 4.1 |
| hsa-miR-141 | 3.2 | 19.7 |
| hsa-cand720 | 3.1 | 2.0 |
| hsa-asg-3998 | 2.7 | 4.3 |
| hsa-asg-11877 | 2.7 | 2.4 |
| hsa-asg-9723 | 2.6 | 3.1 |
| hsa-asg-14048 | 2.6 | 2.4 |
| hsa-miR-31 | 2.6 | 2.6 |
| hsa-asg-11285 | 2.5 | 2.2 |
| hsa-asg-8266 | 2.4 | 2.9 |
| hsa-asg-1399 | 2.3 | 2.6 |

### Example 5

### Ort-PCR Verification of Differentially Expressed Micro-RNAS in Cancer-positive and Cancer-Negative Lymph Nodes from Cervical Cancer Patients

[0243] The inventors also evaluated the differential expression of selected miRNAs in LNpos and LNneg samples (described in Example 1, Table 3) by qRT-PCR. qRT-PCR reactions were performed using TaqMan® MicroRNA Assays (Applied Biosystems; Foster City, Calif., USA) specific for eleven of the most differentially expressed miRNAs between LNpos and LNneg samples and between NCX vs LNneg samples (hsa-miR-205, -203, -429, -200a, -200c, -141, -183, -182, -189, -200b and -224). Assays were performed according to the manufacturer's instructions with 15 ng of input total RNA from one of eight samples (LNpos 1-4, LNneg 1-4) and were incubated in a 7900HT Fast Real-Time PCR system (Applied Biosystems, Foster City, Calif., USA). Initial data analysis was done using the 7500 Fast System SDS V2.3 software (Applied Biosystems). miR-16, whose expression level did not change between the different samples, was used for normalization.

[0244] Results of the qRT-PCR assays revealed that differences in expression levels of the 11 miRNAs, between LNpos and LNneg samples were conserved and were very similar to those observed by microarray analysis (FIGS. 1A-1B).

[0245] These data demonstrate that both qRT-PCR and microarray analysis are effective methods for quantifying miRNA expression when evaluating metastasis of cervical cancer to inguinal lymph nodes.

### Example 6

### ORT-PCR Verification of Differentially Expressed Micro-RNAS by Analysis of Additional Cancer-positive and Cancer-negative Lymph Nodes from Cervical Cancer Patients

[0246] A second set of FFPE tissue samples, distinct from those described in Table 3 above, was purchased from ProteoGenex. Samples were prepared from eight cancer-positive (LNpos5-12) and four cancer-negative (LNneg5-8) lymph nodes that were obtained from twelve different patients with cervical squamous cell carcinoma (cervical cancer) (Table 7). A pathology report and hematoxilin-eosin (H&E)-stained slide were available for each sample. H&E-stained slides were reviewed by a pathologist at Asuragen to confirm lymph node statuses as cancer cell-positive or cancer cell-negative.

TABLE 7
Patient and tissue sample pathology information for lymph nodes from cervical cancer
patients. Lymph nodes from four patients were cancer cell-negative (LNneg), and lymph nodes
from eight patients were cancer cell-positive (LNpos).

| | | | | TNM Stage | AJCC | |
|---|---|---|---|---|---|---|
| | Patient | | | (Sobin and | Stage | |
| Sample | Age (yr) | Cancer | Cervix Tumor | Wittekind, | (Greene, | Lymph Node |
| ID | Ethnicity | Diagnosis | Histological Diagnosis | 2002) | 2002) | Metastases |
| LNneg5 | 24 | normal | squamous cell carcinoma | T1a2N0M0 | IA2 | 0/4 |
| | Caucasian | | moderately differentiated | | | |
| LNneg6 | 44 | normal | squamous cell carcinoma | T1b1N0M0 | IB1 | 0/10 |
| | Caucasian | | moderately differentiated | | | |
| LNneg7 | 44 | normal | squamous cell carcinoma | T1b1N0M0 | IB1 | 0/6 |
| | Caucasian | | moderately differentiated | | | |
| LNneg5 | 58 | normal | squamous cell carcinoma | T1b1N0M0 | IB1 | 0/8 |
| | Caucasian | | poorly differentiated | | | |
| LNpos5 | 31 | metastatic | squamous cell carcinoma | T1b1N1M0 | IIIB | 2/5 |
| | Caucasian | | moderately differentiated | | | |
| LNpos6 | 40 | metastatic | squamous cell carcinoma | T1b1N1M0 | IIIB | 1/5 |
| | Caucasian | | moderately differentiated | | | |
| LNpos7 | 21 | metastatic | squamous cell carcinoma | T1b1N1M0 | IIIB | 2/9 |
| | Caucasian | | poorly differentiated | | | |
| LNpos8 | 56 | metastatic | squamous cell carcinoma | T1b1N1M0 | IIIB | 3/3 |
| | Caucasian | | moderately differentiated | | | |
| LNpos9 | 72 | metastatic | squamous cell carcinoma | T1b1N1M0 | IIIB | 2/8 |
| | Caucasian | | poorly differentiated | | | |
| LNpos10 | 25 | metastatic | squamous cell carcinoma | T2bN1M1 | IVB | 2/7 & ovary |
| | Caucasian | | moderately differentiated | | | |
| LNpos11 | 32 | metastatic | squamous cell carcinoma | T1b1N1M0 | IIIB | 3/10 |
| | Caucasian | | poorly differentiated | | | |
| LNpos12 | 58 | metastatic | squamous cell carcinoma | T2bN1M0 | IIIB | 2/4 |
| | Caucasian | | moderately differentiated | | | |

SCC, squamous cell carcinoma.

[0247] The differential expression of selected miRNAs was evaluated in LNpos5-12 and samples by qRT-PCR. qRT-PCR reactions were performed using TaqMan® MicroRNA Assays (Applied Biosystems) specific for eleven miRNAs (hsa-miR-205, -203, -429, -200a, -200c, -141, -183, -182, -189, -200b, and -224) that are among those most differentially expressed between LNpos1-4 and LNneg1-4 samples and between NCX vs LNneg1-4 samples (Table 6). Assays were performed with 15 ng of input total RNA from one of twelve samples (LNpos 5-12, LNneg 5-8), and data were analyzed as described above in Example 5.

[0248] Differential expression was confirmed for seven of the eleven miRNAs tested (FIG. 2B). The seven miRNAs (miR-205, -203, -429, -200b, -200a, -200c, and -141) were expressed at levels that were at least 100-fold lower in the cancer-negative lymph node samples (LNneg5-8) than in the cancer-positive lymph node samples (LNpos5-12) and correspond to the same miRNAs that were identified as most differentially-expressed by qRT-PCR between lymph node samples LNpos1-4 and LNneg1-4 (FIG. 2A, FIG. 2D). Differential expression of four of the miRNAs was not observed by qRT-PCR quantification with this set of lymph node samples (LNpos5-12 and LNneg5-8). These four miRNAs were the least differentially-expressed between lymph nodes LNpos1-4 and LNneg1-4, with fold changes varying between 10- and 35-fold (FIG. 2A, FIG. 2D).

[0249] Quantification of these miRNAs by qRT-PCR in an independent set of lymph nodes from cervical cancer patients validates their differential expression in cancer-positive and cancer-negative lymph nodes. The seven miRNAs (miR-205, -203, -429, -200b, -200a, -200c, and -141) represent useful markers for the identification of cervical tumor cells in lymph nodes of cervical cancer patients (FIG. 2C).

### Example 7

### Identification of Classifiers for Cancer-positive Lymph Nodes in Patients with Metastatic Cervical Carcinoma

[0250] The inventors have demonstrated that miRNA quantification and expression analysis can differentiate cancer-positive and cancer-negative lymph nodes from the inguinal region of cervical cancer patients. To further demonstrate the utility of specific miRNA markers as diagnostic analytes, the inventors quantified specific combinations of miRNAs by qRT-PCR to determine if any such combinations enhanced the distinction between cancer-positive and cancer-negative lymph nodes from cancer patients. qRT-PCR assays were performed as described in Example 5 above. For miRNA combinations quantified by qRT-PCR, raw Ct values from the quantification of individual miRNAs were added then the Ct value of miR-16 was subtracted. For miRNA combinations quantified by microarray expression analysis, ΔH values for each individual miRNA were added. The inventors determined that quantification of several miRNA combinations (miR-205+miR-429; miR-205+miR-203; miR-429+miR-203; miR-425+miR-203+miR-205) enhances the distinction between cancer positive and cancer-negative lymph nodes from cervical cancer patients (FIG. 3).

[0251] These combinations serve as non-limiting examples. Combinations of qRT-PCR or microarray data for other microRNAs will serve to enhance the distinction between cancer-positive and cancer-negative lymph nodes. Combinations may include subtraction of average Ct values. In that case, if an even number of miRNAs is present in the combination, the subtraction of Ct values in a combination eliminates the need to normalize the data.

### Example 8

### Detection of RNA from Cervical Cancer Cells in a Background of Cancer-negative Lymph Node RNA

[0252] Routine, histological examination of lymph nodes for the presence of cancer metastasis utilizes light microscopic examination of formalin-fixed, paraffin-embedded (FFPE) lymph node tissue that has been stained with hematoxylin and eosin (H&E). The sensitivity of this technique for detecting cancer is approximately 1 cancer cell per 100 normal cells.

[0253] First, the inventors evaluated the sensitivity of detection of cervical cancer miRNA markers using qRT-PCR. Sensitivities of detection were determined for two synthetic miRNAs (hsa-miR-203 and hsa-miR-205) that were shown by microarray analysis to be overexpressed by ≧1,000 fold (>10 ΔCt) in cancer-positive lymph nodes (LNpos) when compared with their expression in cancer-negative lymph nodes (LNneg). Synthetic miRNAs (0-10⁸ copies) were mixed with 15 ng of total RNA from a cancer-negative lymph node, and qRT-PCR reactions specific for each miRNA were performed using TaqMan® MicroRNA Assays (Applied Biosystems). The results of these analyses (FIG. 4) indicate that the limit of detection of miR-205 and miR-203 by qRT-PCR in this assay of the invention is ˜1 cancer cell per ˜10,000 cancer-negative lymph node cells.

[0254] Next, the inventors determined the sensitivities of detection for hsa-miR-205, -429, -200a, -200c, and -141 following the serial 10-fold dilution (1:10; 1:100; 1:1,000; 1:10,000, 1:100,000, and 1:1,000,000) of total RNA from cervical cancer cells (TUM) into a background of total RNA (15 ng) from a cancer-negative lymph node (LNneg). qRT-PCR reactions specific for the each indicated miRNA were performed using TaqMan® MicroRNA Assays (Applied Biosystems). A ΔCt of at least 3.3 (10-fold) from that for the LNneg sample was required for a difference in Ct values to be considered statistically significant. Results of these analyses (FIG. 5A) indicate that the sensitivity of detection was the 1:100 dilution for miR-205, -429, and -200a and the 1:10 dilution for miR-200c and -141.

[0255] Finally, the inventors determined the sensitivities of detection for hsa-miR-205, -429, -200a, -200c, and -141 following the serial 10-fold dilution (1:10; 1:100; 1:1,000; 1:10,000, 1:100,000) of total RNA from a cancer-positive lymph node, containing ˜70% cancerous cells, into a background of total RNA (15 ng) from a cancer-negative lymph node. (FIG. 5B). Results of these analyses indicate that the sensitivity of detection was the 1:100 dilution for mir-205 and miR-429 and the 1:10 dilution for miR-200a, -200c, and -141.

### Example 9

### Melanoma Samples and RNA Isolation

[0256] Three melanoma (MEL1-3) (Table 8), four cancer-positive lymph node (LNpos1A and LNpos2B-4B), and seven cancer-negative lymph node (LNneg1-7) (Table 9) frozen tissue samples were purchased from ProteoGenex (ProteoGenex, Inc.; Culver City, Calif., USA). Melanoma samples were from the chest or shoulder regions of patients, and ten of eleven lymph nodes were axillary, to match the origin of the tumors. All the samples were from different patients. Total RNA isolation from the melanoma and lymph node tissue samples was performed using the mirVana™ miRNA Isolation Kit (Ambion; cat. no. AM1560), following the manufacturer's protocol. Purified total RNA from all samples was quantified using a Nanodrop® ND-1000 (Nanoprop Technologies).

[0257] An independent set of three melanoma (MEL4-6) and four cancer-positive lymph node (LNpos5-8) formalin-fixed, paraffin-embedded (FFPE) tissue samples were purchased from ProteoGenex (ProteoGenex, Inc.; Culver City, Calif., USA). Total RNA isolation from these samples was performed using the RecoverAll™ Total Nucleic Isolation Kit (cat. No. AM1975; Ambion, Inc.; Austin, Tex., USA) as described above in Example 1. Purified total RNA was quantified using a Nanodrop® ND-1000 (Nanodrop Technologies; Wilmington, Del., USA). A hematoxilin-eosin (H&E)-stained slide from each sample was reviewed by a pathologist at Asuragen who confirmed the presence of cancer cells in the lymph nodes.

TABLE 8
Patient and tissue pathology information for melanoma tissue samples. TNM Stage
(Sobin and Wittekind, 2002); Clark's Level (Clark et al., 1969); Breslow Micro-staging
(Breslow, 1970). MEL1-3 were provided as frozen biopsies. MEL4-6 were provided as
FFPE samples.

| | Patient | | | | | | |
|---|---|---|---|---|---|---|---|
| | Age (yr) | | | Clinical | | | Breslow |
| | Sex | Histological | TNM | Stage | LN | Clark's | Micro- |
| Sample | Ethnicity | Diagnosis | Stage | Group | Mets | Level | Staging |
| MEL1 | 70 | pigmented | T3aN0M0 | IIA | No | IV | 4 mm |
| | Male | melanoma, epithelia | | | | | |
| | Caucasian | cell type, left | | | | | |
| | | shoulder | | | | | |
| MEL2 | 47 | pigmented | T4bN3M0 | III | 7/9 | V | 20 mm |
| | Male | melanoma, | | | | | |
| | Caucasian | epithelioid cell type, | | | | | |
| | | anterior chest wall | | | | | |
| MEL3 | 48 | poorly pigmented | T4bN2M0 | III | 2/9 | II | 8 mm |
| | Female | melanoma, spindle | | | | | |
| | Caucasian | cell type, scapula | | | | | |
| MEL4 | 17 | melanoma, | T4aN0M0 | IIB | No | V | 6 mm |
| | Female | epithelioid cell type | | | | | |
| | Caucasian | | | | | | |
| MEL5 | 37 | poorly pigmented | T4bN1M0 | IIB | 1/9 | V | 11 mm |
| | Female | melanoma, | | | | | |
| | Caucasian | epithelioid cell type, | | | | | |
| | | shoulder | | | | | |
| MEL6 | 67 | poorly pigmented, | T4bN0M0 | IIC | No | IV | 7 mm |
| | Female | malignant nodular | | | | | |
| | Caucasian | carcinoma,, | | | | | |
| | | epithelioid type, | | | | | |
| | | shoulder | | | | | |

LN Mets, number of lymph nodes with cancer metastasis/total number of lymph nodes taken.

TABLE 9
Patient and tissue pathology information for lymph node samples (cancer-negative and
cancer-positive) from melanoma cancer patients. LNpos1A, LNpos2-4B, and LNneg1-7 samples
were provided as frozen biopsies. LNpos5-8 samples were provided as FFPE samples. TNM
Stage (Sobin and Wittekind, 2002); Clark's Level (Clark et al., 1969); Breslow Micro-staging
(Breslow, 1970).

| | Patient | | | | | | | |
|---|---|---|---|---|---|---|---|---|
| Sample # | Age (yr) | | Melanoma | | | | | |
| Group | Sex | Cancer | Histological | TNM | Clinical Stage | | | Breslow Micro- |
| Node | Ethnicity | Diagnosis | Diagnosis | Stage | Group | LN Mets | Clark's Level | Staging |
| LNneg1 | 66 | Normal | melanoma, | T4bN0M0 | IIB | 0/7 | III | 20 mm |
| Axillary | Male | | epithelioid & spindle | | | | | |
| | Caucasian | | cell type | | | | | |
| LNneg2 | 71 | Normal | pigmented melanoma, | T4bN0M0 | IIB | 0/3 | IV | 7 mm |
| Axillary | Male | | epithelioid cell type | | | | | |
| | Caucasian | | | | | | | |
| LNneg3 | 50 | Normal | non-pigmented | T4bN0M0 | IIB | 0/8 | III-IV | 5 mm |
| Axillary | Female | | melanoma, spindle cell | | | | | |
| | Caucasian | | type | | | | | |
| LNneg4 | 67 | Normal | melanoma, epithelioid | T4bN2M0 | III | 6/10 | NA | NA |
| Inguinal | Female | | & spindle cell type | | | | | |
| | Caucasian | | | | | | | |
| LNneg5 | 47 | Normal | poorly pigmented | T4bN2M0 | III | 2/6 | III | 15 mm |
| Axillary | Male | | melanoma, epithelioid | | | | | |
| | Caucasian | | cell type | | | | | |
| LNneg6 | 35 | Normal | melanoma, epithelioid | T4bN2M0 | III | 2/6 | V | 45 mm |
| Axillary | Male | | & spindle cell type | | | | | |
| | Caucasian | | | | | | | |
| LNneg7 | 64 | Normal | pigmented melanoma, | T4bN2M0 | III | 2/7 | NA | NA |
| Axillary | Female | | epithelioid cell type | | | | | |
| | Caucasian | | | | | | | |
| LNpos1A | 59 | Melanoma | melanoma, epithelioid | T4bN2M0 | III | 7/8 | V | 30 mm |
| Axillary | Female | | cell type | | | | | |
| | Caucasian | | | | | | | |
| LNpos2B | 80 | Melanoma | pigmented melanoma, | NA | CUP | 2/10 | NA | NA |
| Axillary | Female | | spindle cell type | | | | | |
| | Caucasian | | | | | | | |
| LNpos3B | 56 | Melanoma | pigmented melanoma, | NA | recurrent | 3/5 | NA | NA |
| Axillary | Male | | epithelioid & spindle | | | | | |
| | Caucasian | | cell type | | | | | |
| LNpos4B | 68 | Melanoma | pigmented melanoma, | NA | recurrent | 3/16 | NA | NA |
| Axillary | Female | | epithelioid cell type | | | | | |
| | Caucasian | | | | | | | |
| LNpos5 | 75 | Melanoma | poorly pigmented | T4bN2M0 | IIIB | 2/15 | V | 22 mm |
| | Female | | melanoma, epithelioid | | | | | |
| | Caucasian | | cell type | | | | | |
| LNpos6 | 47 | Melanoma | pigmented melanoma, | T4bN2M0 | IIIB | 7/9 | V | 20 mm |
| | Female | | epithelioid cell type | | | | | |
| | Caucasian | | | | | | | |
| LNpos7 | 67 | Melanoma | poorly pigmented | T4bN2M0 | IIC | No | IV | 7 mm |
| | Female | | melanoma, epithelioid | | | | | |
| | Caucasian | | cell type | | | | | |
| LNpos8 | 62 | Melanoma | melanoma, | T4bNIM0 | III | 1/9 | N/A | N/A |
| | Female | | epithelioid cell type | | | | | |
| | Caucasian | | (regressed) | | | | | |

CUP, cancer of unknown primary origin;
recurrent, recurrence of melanoma;
NA, not available;
LN Mets, number of lymph nodes with cancer metastasis/total number of lymph nodes taken.

### Example 10

### Identification of miRNAs Differentially Expressed Between Melanoma Samples and Cancer-negative Lymph Node Samples

[0258] To identify miRNAs that represent useful markers for metastasis of melanoma cancers to lymph nodes, the inventors identified miRNAs that are expressed at significantly higher levels in melanoma samples from patients with melanoma than in cancer-negative lymph nodes from patients with melanoma.

[0259] miRNA expression was determined for two melanoma samples (MEL1, MEL3, described in Example 9 and Table 8 above) and seven cancer-negative lymph nodes (LNneg1-7, described in Example 9 and Table 9 above). For each tissue sample, microRNA-containing fractions were purified from 10 μg of total RNA using a flashPAGE™ Fractionation Apparatus (Ambion) and analyzed with microarrays as described above in Example 2.

[0260] The inventors identified 90 human miRNAs (34 verified and 56 predicted) with average expression levels that were significantly higher in the two melanoma (MEL) samples than in cancer-negative lymph nodes (LNneg) (log 2Diff(MEL vs LNneg)≧1 and p-value<0.05) (Table 10). Among the verified miRNAs, the average expression level of hsa-miR-205 was 260-fold higher in MEL samples than in LNneg; the average expression levels of four miRNAs (hsa-miR-203, -211, -509, and -513) were between 60- and 160-fold higher in MEL samples than in LNneg samples; four miRNAs (hsa-miR-200c, -132, -506, and -508) had average expression levels between 10- and 15-fold higher in MEL than in LNneg samples, and 11 miRNAs had average expression levels between 5- and 10-fold higher in MEL samples (Table 10). In addition, 19 miRNAs had average expression levels that were lower in MEL samples than in LNneg samples. Among these, one (hsa-miR-1) was expressed at a level at least 5-fold lower in MEL samples (Table 10). Among the predicted miRNAs, one (hsa-asg-5638-st2) was expressed at a level more than 100-fold higher in MEL samples compared to LNneg samples, and seven miRNAs (hsa-asg-11338_st2, -5630_st2, -13997_st2, -8428_st2, -9186_st1, -1296_st1, and -9723_st2) had average expression levels between 5- and 25-fold higher in MEL samples (Table 10).

TABLE 10
MicroRNAs Differentially Expressed Between Melanoma Samples (MEL)
and Cancer-Negative Lymph Node Samples (LNneg) from Melanoma Patients.

| Micro | Probe | MEL | | | | | LNneg | | |
|---|---|---|---|---|---|---|---|---|---|
| RNA | ID | 1 | 3 | Mean | SD | % | 1 | 2 | 3 |
| hsa-miR- | hsa-miR- | 13.32 | 11.35 | 12.33 | 1.40 | 100 | 5.03 | 3.70 | 4.67 |
| 205 | 205_st1 | | | | | | | | |
| hsa-miR- | hsa-miR- | 13.82 | 12.43 | 13.13 | 0.98 | 100 | 4.37 | 5.90 | 5.84 |
| 203 | 203_st2 | | | | | | | | |
| hsa-miR- | hsa-miR- | 10.72 | 10.18 | 10.45 | 0.38 | 100 | 3.20 | 5.75 | 2.62 |
| 211 | 211_st1 | | | | | | | | |
| hsa-miR- | hsa-miR- | 11.61 | 13.17 | 12.39 | 1.11 | 100 | 6.09 | 8.04 | 6.00 |
| 509 | 509_st2 | | | | | | | | |
| hsa-miR- | hsa-miR- | 10.22 | 12.33 | 11.28 | 1.49 | 100 | 3.01 | 7.12 | 5.52 |
| 513 | 513_st1 | | | | | | | | |
| hsa-miR- | hsa-miR- | 12.67 | 10.60 | 11.64 | 1.47 | 100 | 8.90 | 7.29 | 7.04 |
| 200c | 200c_st1 | | | | | | | | |
| hsa-miR- | hsa-miR- | 9.33 | 9.05 | 9.19 | 0.20 | 100 | 6.62 | 4.36 | 4.55 |
| 132 | 132_st1 | | | | | | | | |
| hsa-miR- | hsa-miR- | 8.90 | 11.22 | 10.06 | 1.64 | 100 | 6.15 | 7.11 | 6.59 |
| 506 | 506_st2 | | | | | | | | |
| hsa-miR- | hsa-miR- | 9.31 | 10.88 | 10.09 | 1.11 | 100 | 6.06 | 7.31 | 7.14 |
| 508 | 508_st1 | | | | | | | | |
| hsa-miR- | hsa-miR- | 8.58 | 10.58 | 9.58 | 1.41 | 100 | 5.47 | 6.35 | 6.90 |
| 183 | 183_st1 | | | | | | | | |
| hsa-miR- | hsa-miR- | 11.29 | 8.88 | 10.08 | 1.71 | 100 | 6.34 | 6.10 | 6.86 |
| 200b | 200b_st1 | | | | | | | | |
| hsa-miR- | hsa-miR- | 6.95 | 9.35 | 8.15 | 1.69 | 100 | 4.62 | 5.83 | 5.85 |
| 510 | 510_st2 | | | | | | | | |
| hsa-miR- | hsa-miR- | 7.37 | 4.43 | 5.90 | 2.08 | 50 | 2.59 | 2.44 | 3.59 |
| 561 | 561_st1 | | | | | | | | |
| hsa-miR- | hsa-miR- | 7.49 | 7.26 | 7.38 | 0.16 | 100 | 3.64 | 3.70 | 3.26 |
| 493-5p | 493-5p_st1 | | | | | | | | |
| hsa-miR- | hsa-miR- | 5.44 | 6.62 | 6.03 | 0.83 | 50 | 3.01 | 3.06 | 2.89 |
| 514 | 514_st1 | | | | | | | | |
| hsa-miR- | hsa-miR- | 8.59 | 8.32 | 8.45 | 0.19 | 100 | 4.80 | 5.52 | 5.44 |
| 584 | 584_st2 | | | | | | | | |
| hsa-miR-9 | hsa-miR- | 5.84 | 8.06 | 6.95 | 1.57 | 100 | 3.64 | 4.12 | 3.59 |
| | 9_st2 | | | | | | | | |
| hsa-miR- | hsa-miR- | 6.71 | 4.23 | 5.47 | 1.76 | 50 | 2.80 | 2.44 | 3.26 |
| 576 | 576_st2 | | | | | | | | |
| hsa-miR-9* | hsa-miR-9-_st2 | 6.94 | 9.80 | 8.37 | 2.02 | 100 | 5.62 | 5.46 | 5.15 |
| hsa-miR-96 | hsa-miR- | 5.62 | 6.89 | 6.26 | 0.89 | 50 | 3.64 | 4.74 | 2.76 |
| | 96_st1 | | | | | | | | |
| hsa-miR- | hsa-miR- | 10.08 | 11.77 | 10.92 | 1.19 | 100 | 7.90 | 8.91 | 8.60 |
| 182 | 182_st1 | | | | | | | | |
| hsa-miR- | hsa-miR- | 5.60 | 4.43 | 5.01 | 0.82 | 0 | 3.48 | 3.06 | 2.95 |
| 605 | 605_st1 | | | | | | | | |
| hsa-miR- | hsa-miR- | 9.12 | 9.25 | 9.19 | 0.09 | 100 | 7.78 | 6.55 | 6.63 |
| 421 | 421-3p_st1 | | | | | | | | |
| hsa-miR- | hsa-miR- | 5.71 | 6.41 | 6.06 | 0.50 | 50 | 2.80 | 4.84 | 3.74 |
| 432 | 432_st2 | | | | | | | | |
| hsa-miR- | hsa-miR- | 5.86 | 3.23 | 4.55 | 1.87 | 0 | 3.01 | 3.06 | 2.62 |
| 429 | 429_st1 | | | | | | | | |
| hsa-miR- | hsa-asg- | 4.53 | 4.61 | 4.57 | 0.06 | 0 | 3.20 | 2.69 | 2.76 |
| 592 | 4400_st1 | | | | | | | | |
| hsa-miR- | hsa-miR- | 6.70 | 5.64 | 6.17 | 0.75 | 100 | 4.26 | 4.84 | 4.28 |
| 495 | 495_st1 | | | | | | | | |
| hsa-miR- | hsa-miR- | 5.19 | 4.69 | 4.94 | 0.35 | 0 | 2.90 | 2.82 | 4.01 |
| 187 | 187_st1 | | | | | | | | |
| hsa-miR- | hsa-miR- | 7.91 | 7.64 | 7.77 | 0.20 | 100 | 6.09 | 5.99 | 6.13 |
| 382 | 382_st1 | | | | | | | | |
| hsa-miR- | hsa-miR- | 8.86 | 9.76 | 9.31 | 0.64 | 100 | 7.72 | 7.95 | 8.14 |
| 34a | 34a_st1 | | | | | | | | |
| hsa-miR- | hsa-miR- | 6.15 | 5.39 | 5.77 | 0.54 | 50 | 4.01 | 4.68 | 4.61 |
| 376a | 376a_st2 | | | | | | | | |
| hsa-miR- | hsa-miR- | 8.98 | 9.21 | 9.10 | 0.16 | 100 | 7.31 | 7.99 | 8.32 |
| 193b | 193b_st1 | | | | | | | | |
| hsa-miR- | hsa-miR- | 11.08 | 11.50 | 11.29 | 0.30 | 100 | 10.51 | 10.21 | 10.58 |
| 222 | 222_st2 | | | | | | | | |
| hsa-miR- | hsa- | 5.74 | 5.98 | 5.86 | 0.17 | 50 | 5.03 | 4.84 | 4.42 |
| 365 | cand708_st1 | | | | | | | | |
| hsa-miR- | hsa-miR- | 7.57 | 6.77 | 7.17 | 0.56 | 100 | 6.09 | 6.52 | 6.84 |
| 494 | 494_st1 | | | | | | | | |
| hsa-miR- | hsa-miR- | 12.18 | 11.88 | 12.03 | 0.21 | 100 | 10.84 | 11.49 | 11.38 |
| 27a | 27a_st2 | | | | | | | | |
| hsa-miR- | hsa-miR- | 7.04 | 6.95 | 6.99 | 0.07 | 100 | 5.93 | 6.35 | 6.09 |
| 379 | 379_st1 | | | | | | | | |
| hsa-miR- | hsa-miR- | 13.13 | 12.40 | 12.77 | 0.52 | 100 | 11.98 | 12.08 | 12.05 |
| 27b | 27b_st1 | | | | | | | | |
| hsa-miR-21 | hsa-miR- | 13.86 | 13.68 | 13.77 | 0.13 | 100 | 13.12 | 13.65 | 13.21 |
| | 21_st2 | | | | | | | | |
| hsa-miR-24 | hsa-miR- | 13.74 | 13.62 | 13.68 | 0.08 | 100 | 12.70 | 13.26 | 13.20 |
| | 24_st1 | | | | | | | | |
| hsa-miR- | hsa-miR- | 13.74 | 13.62 | 13.68 | 0.09 | 100 | 13.34 | 13.11 | 13.25 |
| 23b | 23b_st1 | | | | | | | | |
| hsa-miR- | hsa-miR- | 12.85 | 13.24 | 13.04 | 0.28 | 100 | 12.80 | 12.57 | 12.65 |
| 221 | 221_st1 | | | | | | | | |
| hsa-let-7e | hsa-let- | 12.45 | 12.79 | 12.62 | 0.23 | 100 | 12.00 | 12.23 | 12.19 |
| | 7e_st1 | | | | | | | | |
| hsa-miR- | hsa-miR- | 11.91 | 12.01 | 11.96 | 0.07 | 100 | 11.74 | 11.66 | 11.37 |
| 30b | 30b_st2 | | | | | | | | |
| hsa-miR- | hsa-miR- | 5.23 | 5.32 | 5.28 | 0.07 | 0 | 4.92 | 4.68 | 5.11 |
| 618 | 618_st2 | | | | | | | | |
| hsa-miR- | hsa-miR- | 13.95 | 13.94 | 13.95 | 0.01 | 100 | 13.63 | 13.50 | 13.74 |
| 23a | 23a_st2 | | | | | | | | |
| hsa-miR- | hsa-miR- | 12.59 | 12.36 | 12.48 | 0.17 | 100 | 12.63 | 12.97 | 13.05 |
| 199a* | 199a-_st1 | | | | | | | | |
| hsa-miR- | hsa-miR- | 12.82 | 12.14 | 12.48 | 0.48 | 100 | 13.04 | 13.35 | 13.14 |
| 145 | 145_st1 | | | | | | | | |
| hsa-miR- | hsa- | 11.04 | 10.90 | 10.97 | 0.10 | 100 | 10.96 | 11.55 | 11.65 |
| 99a | cand160_st2 | | | | | | | | |
| hsa-miR- | hsa-miR- | 12.62 | 11.48 | 12.05 | 0.81 | 100 | 12.73 | 13.02 | 12.80 |
| 195 | 195_st2 | | | | | | | | |
| hsa-miR- | hsa-asg- | 6.77 | 6.19 | 6.48 | 0.41 | 50 | 7.82 | 7.13 | 6.86 |
| 331 | 14205_st1 | | | | | | | | |
| hsa-miR- | hsa-miR- | 12.03 | 11.24 | 11.63 | 0.56 | 100 | 12.03 | 12.78 | 12.72 |
| 143 | 143_st2 | | | | | | | | |
| hsa-miR- | hsa-miR- | 9.62 | 8.44 | 9.03 | 0.84 | 100 | 9.52 | 10.13 | 10.16 |
| 199a | 199a_st2 | | | | | | | | |
| hsa-miR- | hsa-miR- | 11.60 | 10.60 | 11.10 | 0.71 | 100 | 12.15 | 12.35 | 12.36 |
| 10b | 10b_st2 | | | | | | | | |
| hsa-miR- | hsa-miR- | 5.54 | 5.34 | 5.44 | 0.14 | 0 | 7.07 | 6.62 | 6.44 |
| 339 | 339_st1 | | | | | | | | |
| hsa-miR-7 | hsa-miR- | 8.41 | 8.58 | 8.50 | 0.12 | 100 | 10.25 | 9.66 | 9.09 |
| | 7_st1 | | | | | | | | |
| hsa-miR- | hsa-miR- | 10.46 | 10.28 | 10.37 | 0.13 | 100 | 11.90 | 11.78 | 11.44 |
| 148a | 148a_st1 | | | | | | | | |
| hsa-miR- | hsa-miR- | 9.95 | 8.90 | 9.43 | 0.74 | 100 | 11.25 | 11.01 | 10.82 |
| 29b | 29b_st1 | | | | | | | | |
| hsa-miR- | hsa-miR- | 12.96 | 11.27 | 12.12 | 1.19 | 100 | 13.38 | 13.73 | 13.84 |
| 342 | 342_st1 | | | | | | | | |
| hsa-miR- | hsa- | 6.65 | 5.48 | 6.06 | 0.83 | 0 | 7.19 | 7.68 | 7.66 |
| 497 | miR43_st1 | | | | | | | | |
| hsa-miR- | hsa-miR- | 5.19 | 5.59 | 5.39 | 0.28 | 0 | 6.29 | 6.90 | 6.91 |
| 215 | 215_st1 | | | | | | | | |
| hsa-miR- | hsa-miR- | 8.33 | 9.67 | 9.00 | 0.95 | 100 | 10.24 | 10.16 | 10.60 |
| 192 | 192_st2 | | | | | | | | |
| hsa-miR-17- | hsa-miR-17- | 4.99 | 5.01 | 5.00 | 0.02 | 0 | 6.93 | 6.98 | 6.53 |
| 3p | 3p_st1 | | | | | | | | |
| hsa-miR-95 | hsa-miR- | 8.49 | 5.91 | 7.20 | 1.82 | 100 | 8.68 | 8.53 | 8.61 |
| | 95_st1 | | | | | | | | |
| hsa-miR- | hsa-miR- | 7.55 | 6.46 | 7.00 | 0.77 | 100 | 8.78 | 8.27 | 8.79 |
| 505 | 505_st1 | | | | | | | | |
| hsa-miR- | hsa-miR- | 5.57 | 4.75 | 5.16 | 0.58 | 0 | 8.05 | 6.96 | 6.71 |
| 598 | 598_st2 | | | | | | | | |
| hsa-miR- | hsa-miR- | 8.52 | 8.33 | 8.43 | 0.13 | 100 | 11.18 | 10.41 | 10.48 |
| 29c | 29c_st2 | | | | | | | | |
| hsa-miR- | hsa-miR- | 3.97 | 2.35 | 3.16 | 1.15 | 0 | 3.72 | 5.36 | 4.83 |
| 133b | 133b_st2 | | | | | | | | |
| hsa-miR- | hsa-miR- | 4.70 | 3.23 | 3.96 | 1.04 | 0 | 5.14 | 6.04 | 6.16 |
| 133a | 133a_st1 | | | | | | | | |
| hsa-miR-1 | hsa-miR- | 7.28 | 5.75 | 6.51 | 1.08 | 100 | 8.27 | 9.62 | 8.72 |
| | 1_st1 | | | | | | | | |
| hsa-asg- | hsa-asg- | 9.47 | 11.07 | 10.27 | 1.13 | 100 | 3.20 | 5.22 | 3.02 |
| 5638 | 5638_st2 | | | | | | | | |
| hsa-asg- | hsa-asg- | 7.15 | 9.46 | 8.30 | 1.63 | 100 | 4.32 | 3.88 | 3.54 |
| 11338 | 11338_st2 | | | | | | | | |
| hsa-asg- | hsa-asg- | 6.83 | 9.45 | 8.14 | 1.85 | 100 | 6.46 | 4.19 | 3.02 |
| 5630 | 5630_st2 | | | | | | | | |
| hsa-asg- | hsa-asg- | 6.97 | 4.49 | 5.73 | 1.75 | 50 | 3.01 | 2.57 | 3.49 |
| 13997 | 13997_st2 | | | | | | | | |
| hsa-asg- | hsa-asg- | 6.75 | 4.72 | 5.74 | 1.44 | 100 | 3.01 | 3.06 | 2.76 |
| 8428 | 8428_st2 | | | | | | | | |
| hsa-asg- | hsa-asg- | 7.60 | 8.05 | 7.82 | 0.32 | 100 | 4.26 | 6.07 | 5.35 |
| 9186 | 9186_st1 | | | | | | | | |
| hsa-asg- | hsa-asg- | 6.52 | 4.64 | 5.58 | 1.33 | 50 | 3.20 | 2.94 | 2.62 |
| 1296 | 1296_st1 | | | | | | | | |
| hsa-asg- | hsa-asg- | 5.74 | 5.05 | 5.39 | 0.48 | 100 | 3.01 | 3.29 | 2.36 |
| 9723 | 9723_st2 | | | | | | | | |
| hsa-asg- | hsa-asg- | 6.09 | 4.55 | 5.32 | 1.09 | 50 | 2.80 | 2.69 | 3.59 |
| 11380 | 11380_st2 | | | | | | | | |
| hsa-asg- | hsa-asg- | 4.47 | 6.30 | 5.39 | 1.30 | 50 | 3.11 | 3.40 | 3.08 |
| 2261 | 2261_st1 | | | | | | | | |
| hsa-asg- | hsa-asg- | 8.07 | 9.09 | 8.58 | 0.72 | 100 | 5.74 | 6.92 | 7.20 |
| 1519 | 1519_st1 | | | | | | | | |
| hsa-asg- | hsa-asg- | 5.91 | 4.43 | 5.17 | 1.05 | 50 | 3.11 | 3.06 | 4.13 |
| 1794 | 1794_st1 | | | | | | | | |
| hsa-asg- | hsa-asg- | 6.25 | 6.91 | 6.58 | 0.47 | 50 | 4.48 | 4.51 | 4.49 |
| 12271 | 12271_st1 | | | | | | | | |
| hsa-asg- | hsa-asg- | 5.44 | 7.37 | 6.41 | 1.37 | 50 | 3.80 | 3.70 | 4.39 |
| 14208 | 14208_st1 | | | | | | | | |
| hsa-asg- | hsa-asg- | 4.53 | 6.90 | 5.71 | 1.68 | 50 | 3.72 | 3.70 | 3.14 |
| 8486 | 8486_st2 | | | | | | | | |
| hsa-asg- | hsa-asg- | 10.46 | 10.75 | 10.61 | 0.20 | 100 | 8.43 | 8.50 | 9.42 |
| 5640 | 5640_st1 | | | | | | | | |
| hsa-cand317 | hsa- | 6.62 | 4.61 | 5.61 | 1.42 | 50 | 3.48 | 4.19 | 2.76 |
| | cand317_st1 | | | | | | | | |
| hsa-asg- | hsa-asg- | 4.59 | 5.46 | 5.02 | 0.62 | 50 | 3.48 | 3.88 | 3.02 |
| 2335 | 2335_st1 | | | | | | | | |
| hsa-asg- | hsa-asg- | 5.79 | 3.55 | 4.67 | 1.58 | 50 | 3.30 | 3.29 | 3.02 |
| 1587 | 1587_st1 | | | | | | | | |
| hsa-asg- | hsa-asg- | 5.62 | 6.32 | 5.97 | 0.49 | 50 | 4.26 | 3.83 | 4.83 |
| 4803 | 4803_st2 | | | | | | | | |
| hsa-asg- | hsa-asg- | 10.94 | 10.80 | 10.87 | 0.10 | 100 | 9.51 | 8.48 | 9.66 |
| 13278 | 13278_st2 | | | | | | | | |
| hsa-asg-497 | hsa-asg- | 7.46 | 7.19 | 7.33 | 0.19 | 100 | 5.71 | 5.67 | 5.80 |
| | 497_st2 | | | | | | | | |
| hsa-asg- | hsa-asg- | 5.37 | 6.00 | 5.69 | 0.44 | 0 | 3.11 | 4.22 | 5.02 |
| 9796 | 9796_st1 | | | | | | | | |
| hsa-asg- | hsa-asg- | 6.39 | 4.55 | 5.47 | 1.30 | 50 | 4.58 | 3.29 | 3.93 |
| 10031 | 10031_st1 | | | | | | | | |
| hsa-asg- | hsa-asg- | 6.00 | 5.55 | 5.78 | 0.32 | 50 | 4.37 | 4.33 | 3.74 |
| 9980 | 9980_st1 | | | | | | | | |
| hsa-asg- | hsa-asg- | 4.94 | 6.89 | 5.91 | 1.37 | 50 | 4.32 | 4.26 | 4.46 |
| 12453 | 12453_st2 | | | | | | | | |
| hsa-asg- | hsa-asg- | 7.71 | 5.70 | 6.70 | 1.42 | 50 | 5.07 | 4.79 | 5.45 |
| 11489 | 11489_st1 | | | | | | | | |
| hsa-asg- | hsa-asg- | 4.90 | 4.72 | 4.81 | 0.12 | 0 | 2.90 | 3.18 | 3.38 |
| 11361 | 11361_st2 | | | | | | | | |
| hsa-asg- | hsa-asg- | 7.18 | 6.67 | 6.93 | 0.36 | 100 | 5.14 | 5.02 | 5.40 |
| 12807 | 12807_st2 | | | | | | | | |
| hsa-asg- | hsa-asg- | 6.44 | 6.14 | 6.29 | 0.22 | 100 | 4.71 | 4.57 | 4.83 |
| 7511 | 7511_st2 | | | | | | | | |
| hsa-asg- | hsa-asg- | 6.93 | 5.21 | 6.07 | 1.21 | 50 | 4.84 | 4.88 | 5.07 |
| 9762 | 9762_st1 | | | | | | | | |
| hsa-asg- | hsa-asg- | 7.39 | 8.00 | 7.69 | 0.43 | 50 | 5.62 | 6.44 | 6.84 |
| 12372 | 12372_st2 | | | | | | | | |
| hsa-asg- | hsa-asg- | 9.22 | 8.68 | 8.95 | 0.38 | 100 | 8.20 | 6.66 | 8.11 |
| 4223 | 4223_st2 | | | | | | | | |
| hsa-asg- | hsa-asg- | 7.02 | 6.29 | 6.65 | 0.52 | 100 | 5.98 | 5.56 | 5.61 |
| 11402 | 11402_st1 | | | | | | | | |
| hsa-asg- | hsa-asg- | 7.79 | 7.46 | 7.62 | 0.23 | 100 | 6.52 | 6.33 | 6.46 |
| 8633 | 8633_st1 | | | | | | | | |
| hsa-asg- | hsa-asg- | 7.21 | 6.62 | 6.91 | 0.42 | 100 | 5.23 | 6.18 | 5.94 |
| 4780 | 4780_st1 | | | | | | | | |
| hsa-asg- | hsa-asg- | 6.98 | 6.99 | 6.98 | 0.01 | 100 | 5.47 | 5.84 | 5.79 |
| 9117 | 9117_st1 | | | | | | | | |
| hsa-asg- | hsa-asg- | 6.19 | 5.29 | 5.74 | 0.64 | 50 | 4.84 | 4.04 | 4.21 |
| 1362 | 1362_st2 | | | | | | | | |
| hsa-asg- | hsa-asg- | 10.75 | 10.40 | 10.57 | 0.25 | 100 | 8.77 | 9.78 | 9.09 |
| 14233 | 14233_st1 | | | | | | | | |
| hsa-asg- | hsa-asg- | 13.14 | 12.47 | 12.80 | 0.47 | 100 | 12.38 | 11.41 | 11.96 |
| 13309 | 13309_st2 | | | | | | | | |
| hsa-asg- | hsa-asg- | 8.42 | 7.09 | 7.76 | 0.94 | 100 | 6.86 | 6.57 | 6.69 |
| 13841 | 13841_st2 | | | | | | | | |
| hsa-asg- | hsa-asg- | 7.42 | 7.26 | 7.34 | 0.11 | 100 | 5.78 | 6.08 | 6.22 |
| 14001 | 14001_st1 | | | | | | | | |
| hsa-asg- | hsa-asg- | 5.65 | 5.64 | 5.65 | 0.01 | 50 | 4.58 | 5.14 | 4.80 |
| 12320 | 12320_st2 | | | | | | | | |
| hsa-asg- | hsa-asg- | 8.14 | 7.07 | 7.61 | 0.76 | 100 | 6.35 | 6.73 | 6.63 |
| 9227 | 9227_st1 | | | | | | | | |
| hsa-asg- | hsa-asg- | 7.30 | 7.00 | 7.15 | 0.21 | 100 | 5.97 | 6.18 | 6.36 |
| 7922 | 7922_st2 | | | | | | | | |
| hsa-asg- | hsa-asg- | 9.19 | 9.35 | 9.27 | 0.11 | 100 | 7.76 | 8.44 | 8.32 |
| 9261 | 9261_st1 | | | | | | | | |
| hsa-cand732 | hsa- | 7.47 | 8.16 | 7.82 | 0.49 | 100 | 6.44 | 6.34 | 6.99 |
| | cand732_st2 | | | | | | | | |
| hsa-asg- | hsa-asg- | 6.05 | 6.04 | 6.05 | 0.00 | 50 | 5.30 | 5.06 | 4.72 |
| 13924 | 13924_st1 | | | | | | | | |
| hsa-asg- | hsa-asg- | 5.84 | 5.46 | 5.65 | 0.27 | 0 | 4.14 | 4.97 | 4.83 |
| 2889 | 2889_st2 | | | | | | | | |
| hsa-asg- | hsa-asg- | 6.79 | 7.43 | 7.11 | 0.45 | 100 | 5.74 | 5.90 | 6.09 |
| 12381 | 12381_st1 | | | | | | | | |
| hsa-asg- | hsa-asg- | 7.36 | 7.75 | 7.56 | 0.28 | 100 | 6.53 | 6.64 | 6.31 |
| 8003 | 8003_st2 | | | | | | | | |
| hsa-asg- | hsa-asg- | 6.51 | 5.64 | 6.08 | 0.61 | 100 | 4.80 | 5.18 | 4.64 |
| 7262 | 7262_st1 | | | | | | | | |
| hsa-asg- | hsa-asg- | 10.31 | 11.71 | 11.01 | 0.99 | 100 | 9.65 | 9.98 | 10.04 |
| 11850 | 11850_st1 | | | | | | | | |
| hsa-asg- | hsa-asg- | 6.60 | 6.87 | 6.74 | 0.19 | 100 | 5.93 | 5.87 | 5.70 |
| 7027 | 7027_st2 | | | | | | | | |
| hsa-asg- | hsa-asg- | 8.58 | 9.10 | 8.84 | 0.37 | 100 | 7.89 | 7.38 | 8.02 |
| 12937 | 12937_st2 | | | | | | | | |
| hsa-asg-345 | hsa-asg- | 5.60 | 5.75 | 5.68 | 0.11 | 50 | 4.84 | 4.74 | 5.02 |
| | 345_st1 | | | | | | | | |
| hsa-asg- | hsa-asg- | 6.63 | 6.13 | 6.38 | 0.35 | 100 | 6.34 | 5.26 | 5.38 |
| 4969 | 4969_st2 | | | | | | | | |
| hsa-asg- | hsa-asg- | 6.92 | 5.88 | 6.40 | 0.73 | 50 | 5.17 | 5.64 | 5.64 |
| 3798 | 3798_st1 | | | | | | | | |
| hsa-asg- | hsa-asg- | 6.89 | 7.41 | 7.15 | 0.37 | 100 | 5.91 | 6.08 | 5.97 |
| 4703 | 4703_st2 | | | | | | | | |
| hsa-asg- | hsa-asg- | 4.59 | 3.55 | 4.07 | 0.73 | 0 | 3.48 | 2.19 | 2.95 |
| 8792 | 8792_st1 | | | | | | | | |
| hsa-asg- | hsa-asg- | 5.89 | 6.10 | 5.99 | 0.15 | 50 | 4.58 | 5.18 | 5.61 |
| 4460 | 4460_st2 | | | | | | | | |
| hsa-asg- | hsa-asg- | 7.83 | 8.30 | 8.06 | 0.33 | 100 | 6.57 | 7.31 | 7.25 |
| 4026 | 4026_st1 | | | | | | | | |
| hsa-cand421 | hsa- | 11.03 | 12.08 | 11.56 | 0.75 | 100 | 10.27 | 10.91 | 10.45 |
| | cand421_st1 | | | | | | | | |
| hsa-asg- | hsa-asg- | 8.43 | 8.61 | 8.52 | 0.13 | 100 | 6.97 | 7.90 | 7.97 |
| 3670 | 3670_st1 | | | | | | | | |
| hsa-asg- | hsa-asg- | 7.83 | 8.38 | 8.10 | 0.39 | 100 | 7.00 | 7.33 | 7.12 |
| 9130 | 9130_st2 | | | | | | | | |
| hsa-asg- | hsa-asg- | 5.65 | 6.97 | 6.31 | 0.93 | 50 | 5.57 | 5.43 | 5.85 |
| 7783 | 7783_st1 | | | | | | | | |
| hsa-asg- | hsa-asg- | 5.79 | 6.48 | 6.13 | 0.49 | 50 | 5.10 | 5.85 | 4.98 |
| 3944 | 3944_st1 | | | | | | | | |
| hsa-asg- | hsa-asg- | 5.74 | 5.83 | 5.78 | 0.07 | 50 | 4.53 | 5.14 | 4.88 |
| 13798 | 13798_st1 | | | | | | | | |
| hsa-asg- | hsa-asg- | 8.85 | 9.09 | 8.97 | 0.16 | 100 | 7.58 | 7.87 | 8.40 |
| 6870 | 6870_st1 | | | | | | | | |
| hsa-asg- | hsa-asg- | 5.41 | 6.00 | 5.70 | 0.42 | 50 | 4.20 | 4.93 | 4.72 |
| 2460 | 2460_st1 | | | | | | | | |
| hsa-asg- | hsa-asg- | 4.70 | 5.86 | 5.28 | 0.82 | 50 | 4.32 | 4.74 | 4.61 |
| 11267 | 11267_st2 | | | | | | | | |
| hsa-asg- | hsa-asg- | 6.48 | 6.11 | 6.29 | 0.26 | 100 | 5.23 | 5.43 | 5.31 |
| 3604 | 3604_st1 | | | | | | | | |
| hsa-asg- | hsa-asg- | 6.93 | 6.77 | 6.85 | 0.11 | 100 | 5.98 | 5.99 | 5.73 |
| 4296 | 4296_st1 | | | | | | | | |
| hsa-asg- | hsa-asg- | 8.56 | 9.33 | 8.95 | 0.54 | 100 | 7.81 | 8.41 | 8.26 |
| 8866 | 8866_st1 | | | | | | | | |
| hsa-asg- | hsa-asg- | 5.86 | 5.36 | 5.61 | 0.36 | 100 | 4.67 | 5.06 | 4.93 |
| 12471 | 12471_st1 | | | | | | | | |
| hsa-asg- | hsa-asg- | 8.55 | 7.89 | 8.22 | 0.46 | 100 | 7.07 | 7.29 | 7.77 |
| 11515 | 11515_st2 | | | | | | | | |
| hsa-asg- | hsa-asg- | 6.21 | 6.81 | 6.51 | 0.42 | 50 | 5.71 | 5.61 | 6.20 |
| 7252 | 7252_st1 | | | | | | | | |
| hsa-asg- | hsa-asg- | 6.52 | 6.52 | 6.52 | 0.00 | 100 | 6.31 | 5.64 | 6.14 |
| 11458 | 11458_st2 | | | | | | | | |
| hsa-asg- | hsa-asg- | 9.17 | 9.63 | 9.40 | 0.33 | 50 | 8.38 | 8.93 | 8.47 |
| 13453 | 13453_st1 | | | | | | | | |
| hsa-asg- | hsa-asg- | 9.98 | 10.07 | 10.02 | 0.07 | 100 | 9.11 | 9.16 | 9.23 |
| 3722 | 3722_st1 | | | | | | | | |
| hsa-asg- | hsa-asg- | 11.02 | 12.01 | 11.52 | 0.69 | 100 | 10.84 | 10.88 | 10.76 |
| 3992 | 3992_st2 | | | | | | | | |
| hsa-asg- | hsa-asg- | 6.75 | 7.24 | 7.00 | 0.35 | 100 | 6.54 | 6.44 | 6.23 |
| 4373 | 4373_st1 | | | | | | | | |
| hsa-asg- | hsa-asg- | 7.74 | 7.74 | 7.74 | 0.00 | 100 | 6.91 | 7.02 | 7.01 |
| 9480 | 9480_st1 | | | | | | | | |
| hsa-asg- | hsa-asg- | 12.87 | 13.60 | 13.24 | 0.52 | 100 | 12.55 | 12.77 | 12.46 |
| 7939 | 7939_st1 | | | | | | | | |
| hsa-asg- | hsa-asg- | 6.97 | 6.76 | 6.86 | 0.15 | 100 | 6.16 | 6.12 | 6.47 |
| 4448 | 4448_st1 | | | | | | | | |
| hsa-asg- | hsa-asg- | 6.62 | 7.06 | 6.84 | 0.31 | 100 | 6.41 | 6.12 | 6.50 |
| 1338 | 1338_st2 | | | | | | | | |
| hsa-asg- | hsa-asg- | 8.11 | 8.21 | 8.16 | 0.07 | 100 | 7.33 | 7.29 | 7.45 |
| 11617 | 11617_st2 | | | | | | | | |
| hsa-asg-954 | hsa-asg- | 9.97 | 9.90 | 9.93 | 0.05 | 100 | 9.28 | 9.11 | 9.34 |
| | 954_st1 | | | | | | | | |
| hsa-asg- | hsa-asg- | 6.49 | 6.76 | 6.63 | 0.19 | 100 | 6.04 | 6.16 | 5.64 |
| 2381 | 2381_st2 | | | | | | | | |
| hsa-asg- | hsa-asg- | 5.89 | 6.04 | 5.97 | 0.11 | 50 | 5.87 | 5.02 | 5.40 |
| 2697 | 2697_st1 | | | | | | | | |
| hsa-asg- | hsa-asg- | 6.15 | 6.34 | 6.25 | 0.13 | 50 | 5.60 | 5.52 | 5.84 |
| 2365 | 2365_st1 | | | | | | | | |
| hsa-asg- | hsa-asg- | 5.37 | 5.98 | 5.68 | 0.43 | 50 | 5.00 | 5.02 | 5.09 |
| 9795 | 9795_st2 | | | | | | | | |
| hsa-asg- | hsa-asg- | 5.30 | 5.75 | 5.53 | 0.32 | 50 | 4.48 | 4.88 | 4.67 |
| 12457 | 12457_st2 | | | | | | | | |
| hsa-asg- | hsa-asg- | 6.36 | 6.35 | 6.35 | 0.01 | 100 | 5.52 | 5.83 | 5.94 |
| 2500 | 2500_st1 | | | | | | | | |
| hsa-asg- | hsa-asg- | 6.94 | 7.85 | 7.40 | 0.64 | 100 | 6.68 | 6.97 | 7.02 |
| 8882 | 8882_st1 | | | | | | | | |
| hsa-asg- | hsa-asg- | 6.03 | 5.83 | 5.93 | 0.14 | 100 | 5.36 | 5.10 | 5.11 |
| 5973 | 5973_st1 | | | | | | | | |
| hsa-asg- | hsa-asg- | 6.43 | 6.80 | 6.61 | 0.26 | 100 | 5.93 | 6.59 | 5.98 |
| 6616 | 6616_st1 | | | | | | | | |
| hsa-asg- | hsa-asg- | 6.67 | 6.97 | 6.82 | 0.21 | 100 | 6.42 | 6.33 | 6.32 |
| 13294 | 13294_st2 | | | | | | | | |
| hsa-asg- | hsa-asg- | 5.47 | 5.49 | 5.48 | 0.01 | 100 | 5.00 | 4.93 | 4.35 |
| 9521 | 9521_st2 | | | | | | | | |
| hsa-asg- | hsa-asg- | 8.94 | 9.21 | 9.08 | 0.19 | 100 | 8.48 | 8.25 | 8.53 |
| 7450 | 7450_st1 | | | | | | | | |
| hsa-asg- | hsa-asg- | 4.90 | 5.17 | 5.04 | 0.20 | 50 | 4.53 | 4.33 | 4.42 |
| 4030 | 4030_st2 | | | | | | | | |
| hsa-asg- | hsa-asg- | 7.27 | 7.69 | 7.48 | 0.30 | 100 | 6.64 | 6.89 | 7.15 |
| 12406 | 12406_st1 | | | | | | | | |
| hsa-asg- | hsa-asg- | 6.13 | 6.11 | 6.12 | 0.02 | 50 | 5.67 | 5.90 | 5.76 |
| 12885 | 12885_st1 | | | | | | | | |
| hsa-cand873 | hsa- | 5.86 | 5.93 | 5.90 | 0.05 | 100 | 5.41 | 5.29 | 5.02 |
| | cand873_st1 | | | | | | | | |
| hsa-asg- | hsa-asg- | 13.51 | 14.05 | 13.78 | 0.38 | 100 | 13.37 | 13.40 | 13.27 |
| 14201 | 14201_st2 | | | | | | | | |
| hsa-asg- | hsa-asg- | 10.48 | 11.07 | 10.78 | 0.42 | 100 | 10.50 | 10.37 | 10.00 |
| 8568 | 8568_st1 | | | | | | | | |
| hsa-asg- | hsa-asg- | 7.88 | 8.39 | 8.13 | 0.36 | 100 | 7.57 | 7.54 | 7.68 |
| 3239 | 3239_st2 | | | | | | | | |
| hsa-asg- | hsa-asg- | 7.66 | 7.57 | 7.62 | 0.07 | 100 | 7.19 | 7.01 | 7.12 |
| 4984 | 4984_st1 | | | | | | | | |
| hsa-asg- | hsa-asg- | 6.32 | 6.13 | 6.23 | 0.14 | 100 | 5.98 | 5.64 | 5.80 |
| 2093 | 2093_st1 | | | | | | | | |
| hsa-asg-733 | hsa-asg- | 6.38 | 6.41 | 6.39 | 0.02 | 100 | 5.82 | 6.28 | 6.01 |
| | 733_st1 | | | | | | | | |
| hsa-asg-89 | hsa-asg- | 6.52 | 6.58 | 6.55 | 0.04 | 100 | 6.00 | 6.26 | 6.17 |
| | 89_st2 | | | | | | | | |
| hsa-asg- | hsa-asg- | 6.19 | 6.04 | 6.12 | 0.11 | 100 | 5.78 | 5.56 | 5.89 |
| 12816 | 12816_st1 | | | | | | | | |
| hsa-asg- | hsa-asg- | 5.89 | 5.79 | 5.84 | 0.07 | 0 | 5.27 | 5.70 | 5.61 |
| 11057 | 11057_st1 | | | | | | | | |
| hsa-asg- | hsa-asg- | 6.67 | 6.46 | 6.57 | 0.15 | 100 | 6.11 | 6.30 | 6.17 |
| 6305 | 6305_st1 | | | | | | | | |
| hsa-asg- | hsa-asg- | 5.86 | 6.03 | 5.95 | 0.12 | 50 | 5.95 | 5.59 | 5.49 |
| 4587 | 4587_st1 | | | | | | | | |
| hsa-asg- | hsa-asg- | 6.03 | 6.13 | 6.08 | 0.07 | 50 | 5.85 | 6.02 | 5.92 |
| 2483 | 2483_st2 | | | | | | | | |
| hsa-asg-758 | hsa-asg- | 6.25 | 6.20 | 6.23 | 0.04 | 50 | 6.51 | 6.71 | 6.34 |
| | 758_st1 | | | | | | | | |
| hsa-asg- | hsa-asg- | 6.34 | 6.29 | 6.31 | 0.04 | 100 | 6.38 | 6.59 | 6.82 |
| 7410 | 7410_st1 | | | | | | | | |
| hsa-asg- | hsa-asg- | 9.87 | 10.06 | 9.97 | 0.14 | 100 | 10.37 | 10.21 | 10.17 |
| 2899 | 2899_st2 | | | | | | | | |
| hsa-asg- | hsa-asg- | 9.14 | 8.83 | 8.99 | 0.21 | 50 | 9.10 | 9.21 | 9.44 |
| 7628 | 7628_st2 | | | | | | | | |
| hsa-asg- | hsa-asg- | 10.36 | 10.48 | 10.42 | 0.09 | 100 | 10.76 | 10.52 | 10.96 |
| 14034 | 14034_st1 | | | | | | | | |
| hsa-asg- | hsa-asg- | 9.65 | 9.45 | 9.55 | 0.14 | 100 | 9.69 | 9.77 | 9.89 |
| 8253 | 8253_st2 | | | | | | | | |
| hsa-asg- | hsa-asg- | 4.59 | 4.55 | 4.57 | 0.02 | 0 | 4.76 | 5.18 | 4.72 |
| 4426 | 4426_st2 | | | | | | | | |
| hsa-asg- | hsa-asg- | 6.59 | 6.14 | 6.36 | 0.32 | 50 | 6.52 | 6.73 | 6.78 |
| 8655 | 8655_st1 | | | | | | | | |
| hsa-asg- | hsa-asg- | 10.98 | 11.15 | 11.07 | 0.12 | 100 | 11.43 | 11.30 | 11.51 |
| 10632 | 10632_st1 | | | | | | | | |
| hsa-asg-974 | hsa-asg- | 6.60 | 6.60 | 6.60 | 0.00 | 100 | 6.71 | 7.06 | 7.30 |
| | 974_st2 | | | | | | | | |
| hsa-asg- | hsa-asg- | 6.15 | 6.02 | 6.09 | 0.09 | 0 | 6.32 | 6.46 | 6.60 |
| 7218 | 7218_st1 | | | | | | | | |
| hsa-asg-206 | hsa-asg- | 9.59 | 9.13 | 9.36 | 0.33 | 50 | 9.82 | 9.68 | 9.76 |
| | 206_st2 | | | | | | | | |
| hsa-asg- | hsa-asg- | 7.44 | 7.52 | 7.48 | 0.06 | 0 | 7.64 | 7.74 | 8.17 |
| 3565 | 3565_st2 | | | | | | | | |
| hsa-cand559 | hsa- | 6.88 | 7.08 | 6.98 | 0.14 | 100 | 7.13 | 7.31 | 7.70 |
| | cand559_st1 | | | | | | | | |
| hsa-asg- | hsa-asg- | 8.00 | 7.96 | 7.98 | 0.03 | 100 | 8.67 | 8.09 | 8.48 |
| 1809 | 1809_st1 | | | | | | | | |
| hsa-asg- | hsa-asg- | 8.37 | 8.28 | 8.32 | 0.07 | 100 | 8.63 | 8.61 | 8.74 |
| 4020 | 4020_st2 | | | | | | | | |
| hsa-asg- | hsa-asg- | 7.95 | 7.76 | 7.86 | 0.14 | 100 | 8.02 | 8.21 | 8.42 |
| 10392 | 10392_st1 | | | | | | | | |
| hsa-asg- | hsa-asg- | 6.07 | 6.15 | 6.11 | 0.06 | 0 | 6.32 | 6.60 | 6.49 |
| 9501 | 9501_st1 | | | | | | | | |
| hsa-asg-976 | hsa-asg- | 6.27 | 6.18 | 6.22 | 0.06 | 50 | 6.29 | 6.82 | 6.71 |
| | 976_st2 | | | | | | | | |
| hsa-asg- | hsa-asg- | 9.27 | 9.72 | 9.49 | 0.32 | 100 | 9.97 | 9.92 | 9.87 |
| 5749 | 5749_st2 | | | | | | | | |
| hsa-asg- | hsa-asg- | 8.63 | 9.06 | 8.84 | 0.30 | 100 | 9.43 | 9.12 | 9.14 |
| 8631 | 8631_st1 | | | | | | | | |
| hsa-asg- | hsa-asg- | 8.92 | 8.89 | 8.90 | 0.02 | 50 | 9.32 | 9.13 | 9.24 |
| 7051 | 7051_st1 | | | | | | | | |
| hsa-asg- | hsa-asg- | 5.30 | 5.95 | 5.63 | 0.46 | 50 | 6.16 | 5.78 | 6.06 |
| 10506 | 10506_st2 | | | | | | | | |
| hsa-asg-507 | hsa-asg- | 2.58 | 2.61 | 2.60 | 0.02 | 0 | 3.11 | 2.82 | 2.89 |
| | 507_st1 | | | | | | | | |
| hsa-asg- | hsa-asg- | 7.66 | 7.96 | 7.81 | 0.22 | 100 | 8.11 | 8.16 | 8.00 |
| 6018 | 6018_st2 | | | | | | | | |
| hsa-asg- | hsa-asg- | 9.21 | 9.01 | 9.11 | 0.14 | 50 | 9.41 | 9.43 | 9.71 |
| 3240 | 3240_st1 | | | | | | | | |
| hsa-asg-504 | hsa-asg- | 8.27 | 8.53 | 8.40 | 0.18 | 100 | 8.67 | 8.78 | 8.93 |
| | 504_st2 | | | | | | | | |
| hsa-cand110 | hsa- | 10.26 | 10.37 | 10.31 | 0.08 | 100 | 10.77 | 10.67 | 10.67 |
| | cand110_st2 | | | | | | | | |
| hsa-asg- | hsa-asg- | 11.18 | 10.96 | 11.07 | 0.16 | 100 | 11.45 | 11.50 | 11.40 |
| 3811 | 3811_st1 | | | | | | | | |
| hsa-asg- | hsa-asg- | 10.24 | 10.74 | 10.49 | 0.35 | 100 | 11.03 | 10.89 | 10.72 |
| 6398 | 6398_st2 | | | | | | | | |
| hsa-asg- | hsa-asg- | 9.32 | 9.57 | 9.45 | 0.17 | 100 | 9.71 | 9.86 | 10.00 |
| 4731 | 4731_st1 | | | | | | | | |
| hsa-asg- | hsa-asg- | 9.98 | 10.17 | 10.08 | 0.13 | 100 | 10.70 | 10.28 | 10.39 |
| 7096 | 7096_st2 | | | | | | | | |
| hsa-asg- | hsa-asg- | 8.90 | 8.81 | 8.85 | 0.07 | 100 | 9.11 | 9.35 | 9.13 |
| 6367 | 6367_st1 | | | | | | | | |
| hsa-asg- | hsa-asg- | 9.33 | 8.94 | 9.13 | 0.28 | 50 | 9.32 | 9.64 | 9.52 |
| 3456 | 3456_st2 | | | | | | | | |
| hsa-asg- | hsa-asg- | 6.21 | 6.28 | 6.24 | 0.05 | 100 | 6.31 | 6.80 | 6.71 |
| 1641 | 1641_st1 | | | | | | | | |
| hsa-asg- | hsa-asg- | 9.41 | 9.82 | 9.61 | 0.29 | 100 | 10.16 | 9.86 | 9.98 |
| 2980 | 2980_st2 | | | | | | | | |
| hsa-asg- | hsa-asg- | 8.10 | 8.57 | 8.34 | 0.34 | 100 | 8.96 | 8.78 | 8.70 |
| 4828 | 4828_st1 | | | | | | | | |
| hsa-asg- | hsa-asg- | 8.72 | 8.84 | 8.78 | 0.09 | 100 | 9.13 | 9.19 | 9.42 |
| 9266 | 9266_st1 | | | | | | | | |
| hsa-asg- | hsa-asg- | 10.39 | 10.26 | 10.32 | 0.09 | 100 | 10.63 | 10.81 | 10.78 |
| 3260 | 3260_st2 | | | | | | | | |
| hsa-asg- | hsa-asg- | 7.87 | 7.58 | 7.72 | 0.21 | 100 | 7.91 | 8.32 | 8.19 |
| 6802 | 6802_st1 | | | | | | | | |
| hsa-asg- | hsa-asg- | 5.57 | 5.39 | 5.48 | 0.12 | 0 | 5.76 | 6.18 | 5.84 |
| 7579 | 7579_st2 | | | | | | | | |
| hsa-asg- | hsa-asg- | 3.71 | 3.96 | 3.84 | 0.17 | 0 | 4.08 | 4.63 | 4.42 |
| 12857 | 12857_st1 | | | | | | | | |
| hsa-asg- | hsa-asg- | 7.98 | 8.02 | 8.00 | 0.02 | 100 | 8.17 | 8.41 | 8.26 |
| 8421 | 8421_st1 | | | | | | | | |
| hsa-cand583 | hsa- | 5.62 | 5.21 | 5.42 | 0.29 | 0 | 6.20 | 5.85 | 5.61 |
| | cand583_st1 | | | | | | | | |
| hsa-asg- | hsa-asg- | 8.51 | 8.81 | 8.66 | 0.21 | 100 | 9.32 | 8.93 | 9.13 |
| 1123 | 1123_st1 | | | | | | | | |
| hsa-asg- | hsa-asg- | 9.18 | 8.72 | 8.95 | 0.33 | 100 | 9.30 | 9.46 | 9.43 |
| 11946 | 11946_st1 | | | | | | | | |
| hsa-asg- | hsa-asg- | 6.56 | 6.87 | 6.71 | 0.22 | 100 | 6.96 | 7.36 | 7.26 |
| 12953 | 12953_st2 | | | | | | | | |
| hsa-asg- | hsa-asg- | 8.19 | 7.78 | 7.99 | 0.29 | 100 | 8.23 | 8.32 | 8.52 |
| 10639 | 10639_st1 | | | | | | | | |
| hsa-asg- | hsa-asg- | 7.84 | 7.49 | 7.66 | 0.25 | 100 | 7.93 | 7.85 | 8.20 |
| 3345 | 3345_st1 | | | | | | | | |
| hsa-asg- | hsa-asg- | 7.20 | 7.26 | 7.23 | 0.04 | 100 | 7.65 | 7.81 | 7.75 |
| 3230 | 3230_st1 | | | | | | | | |
| hsa-cand441 | hsa- | 7.25 | 6.85 | 7.05 | 0.28 | 0 | 7.18 | 7.74 | 7.51 |
| | cand441_st2 | | | | | | | | |
| hsa-asg- | hsa-asg- | 10.32 | 9.87 | 10.09 | 0.32 | 100 | 10.62 | 10.36 | 10.48 |
| 3892 | 3892_st2 | | | | | | | | |
| hsa-asg- | hsa-asg- | 6.71 | 6.47 | 6.59 | 0.17 | 100 | 7.01 | 7.18 | 7.12 |
| 7326 | 7326_st1 | | | | | | | | |
| hsa-asg- | hsa-asg- | 6.73 | 7.12 | 6.92 | 0.28 | 100 | 7.31 | 7.29 | 7.58 |
| 1174 | 1174_st2 | | | | | | | | |
| hsa-asg- | hsa-asg- | 6.52 | 6.64 | 6.58 | 0.09 | 0 | 6.90 | 7.24 | 7.57 |
| 3290 | 3290_st1 | | | | | | | | |
| hsa-asg- | hsa-asg- | 7.93 | 7.49 | 7.71 | 0.31 | 50 | 8.12 | 8.40 | 8.21 |
| 12441 | 12441_st1 | | | | | | | | |
| hsa-asg- | hsa-asg- | 7.20 | 7.24 | 7.22 | 0.03 | 100 | 7.68 | 7.82 | 7.40 |
| 4502 | 4502_st1 | | | | | | | | |
| hsa-asg- | hsa-asg- | 8.77 | 8.90 | 8.84 | 0.09 | 50 | 9.38 | 9.41 | 9.31 |
| 11758 | 11758_st2 | | | | | | | | |
| hsa-asg- | hsa-asg- | 6.73 | 6.44 | 6.58 | 0.21 | 100 | 6.80 | 7.05 | 7.29 |
| 4759 | 4759_st1 | | | | | | | | |
| hsa-asg- | hsa-asg- | 7.10 | 7.09 | 7.09 | 0.01 | 0 | 7.35 | 7.37 | 7.65 |
| 3808 | 3808_st1 | | | | | | | | |
| hsa-asg- | hsa-asg- | 7.58 | 7.73 | 7.66 | 0.10 | 100 | 7.99 | 8.37 | 8.11 |
| 11249 | 11249_st2 | | | | | | | | |
| hsa-asg- | hsa-asg- | 8.98 | 9.37 | 9.18 | 0.28 | 100 | 9.76 | 9.63 | 9.44 |
| 6728 | 6728_st2 | | | | | | | | |
| hsa-asg- | hsa-asg- | 7.56 | 6.89 | 7.23 | 0.47 | 100 | 7.80 | 7.71 | 7.68 |
| 2891 | 2891_st1 | | | | | | | | |
| hsa-asg- | hsa-asg- | 4.70 | 4.16 | 4.43 | 0.38 | 0 | 4.80 | 4.74 | 4.83 |
| 14186 | 14186_st2 | | | | | | | | |
| hsa-cand735 | hsa- | 7.49 | 7.47 | 7.48 | 0.01 | 100 | 7.93 | 8.02 | 7.94 |
| | cand735_st2 | | | | | | | | |
| hsa-asg- | hsa-asg- | 4.90 | 5.09 | 4.99 | 0.14 | 0 | 5.52 | 5.70 | 5.73 |
| 8391 | 8391_st1 | | | | | | | | |
| hsa-asg- | hsa-asg- | 5.86 | 6.10 | 5.98 | 0.17 | 0 | 6.32 | 6.56 | 6.56 |
| 1617 | 1617_st2 | | | | | | | | |
| hsa-asg- | hsa-asg- | 8.13 | 8.10 | 8.11 | 0.02 | 100 | 8.81 | 8.50 | 8.73 |
| 2626 | 2626_st1 | | | | | | | | |
| hsa-asg- | hsa-asg- | 6.60 | 6.12 | 6.36 | 0.34 | 50 | 6.79 | 6.76 | 6.95 |
| 11252 | 11252_st2 | | | | | | | | |
| hsa-asg- | hsa-asg- | 4.75 | 4.49 | 4.62 | 0.18 | 0 | 5.17 | 5.36 | 5.81 |
| 11585 | 11585_st2 | | | | | | | | |
| hsa-asg- | hsa-asg- | 7.14 | 6.89 | 7.01 | 0.18 | 100 | 7.57 | 7.64 | 7.76 |
| 10575 | 10575_st1 | | | | | | | | |
| hsa-asg- | hsa-asg- | 6.81 | 6.80 | 6.81 | 0.00 | 100 | 7.27 | 7.18 | 7.19 |
| 14066 | 14066_st2 | | | | | | | | |
| hsa-asg- | hsa-asg- | 7.98 | 7.87 | 7.92 | 0.08 | 50 | 8.22 | 8.27 | 8.37 |
| 11729 | 11729_st2 | | | | | | | | |
| hsa-asg- | hsa-asg- | 6.97 | 7.43 | 7.20 | 0.33 | 100 | 7.83 | 7.73 | 7.43 |
| 11521 | 11521_st1 | | | | | | | | |
| hsa-asg- | hsa-asg- | 8.03 | 8.64 | 8.33 | 0.43 | 100 | 9.11 | 8.89 | 8.82 |
| 12581 | 12581_st1 | | | | | | | | |
| hsa-asg- | hsa-asg- | 8.82 | 8.72 | 8.77 | 0.07 | 50 | 9.35 | 9.21 | 9.40 |
| 13079 | 13079_st2 | | | | | | | | |
| hsa-asg- | hsa-asg- | 4.41 | 4.96 | 4.68 | 0.39 | 0 | 5.14 | 5.52 | 5.33 |
| 7569 | 7569_st1 | | | | | | | | |
| hsa-asg- | hsa-asg- | 8.56 | 8.09 | 8.32 | 0.34 | 100 | 8.83 | 9.16 | 8.82 |
| 3462 | 3462_st2 | | | | | | | | |
| hsa-asg- | hsa-asg- | 6.75 | 6.01 | 6.38 | 0.53 | 50 | 6.57 | 6.97 | 7.38 |
| 8227 | 8227_st2 | | | | | | | | |
| hsa-asg-508 | hsa-asg- | 5.94 | 5.78 | 5.86 | 0.11 | 50 | 6.23 | 5.99 | 6.52 |
| | 508_st2 | | | | | | | | |
| hsa-asg- | hsa-asg- | 7.51 | 6.80 | 7.16 | 0.50 | 100 | 7.57 | 7.73 | 7.66 |
| 2580 | 2580_st1 | | | | | | | | |
| hsa-asg- | hsa-asg- | 7.13 | 6.82 | 6.98 | 0.22 | 100 | 7.04 | 7.56 | 7.87 |
| 7687 | 7687_st2 | | | | | | | | |
| hsa-asg-688 | hsa-asg- | 6.92 | 7.21 | 7.06 | 0.21 | 100 | 7.55 | 7.65 | 7.68 |
| | 688_st2 | | | | | | | | |
| hsa-asg- | hsa-asg- | 7.43 | 7.34 | 7.39 | 0.06 | 100 | 7.59 | 8.05 | 8.10 |
| 3746 | 3746_st1 | | | | | | | | |
| hsa-asg- | hsa-asg- | 4.59 | 5.21 | 4.90 | 0.44 | 0 | 5.30 | 5.10 | 5.73 |
| 2041 | 2041_st1 | | | | | | | | |
| hsa-asg-819 | hsa-asg- | 7.40 | 6.85 | 7.12 | 0.39 | 100 | 7.52 | 7.25 | 7.91 |
| | 819_st1 | | | | | | | | |
| hsa-asg- | hsa-asg- | 4.27 | 4.49 | 4.38 | 0.15 | 0 | 4.88 | 4.79 | 5.21 |
| 4200 | 4200_st1 | | | | | | | | |
| hsa-asg- | hsa-asg- | 6.78 | 6.32 | 6.55 | 0.32 | 100 | 7.05 | 7.32 | 7.53 |
| 4469 | 4469_st1 | | | | | | | | |
| hsa-asg- | hsa-asg- | 4.53 | 4.49 | 4.51 | 0.03 | 0 | 4.71 | 5.14 | 5.25 |
| 10183 | 10183_st1 | | | | | | | | |
| hsa-cand523 | hsa- | 5.57 | 5.34 | 5.45 | 0.16 | 0 | 5.74 | 6.06 | 6.03 |
| | cand523_st1 | | | | | | | | |
| hsa-asg- | hsa-asg- | 6.17 | 5.36 | 5.77 | 0.58 | 0 | 6.00 | 6.57 | 6.33 |
| 8393 | 8393_st1 | | | | | | | | |
| hsa-asg- | hsa-asg- | 6.03 | 5.98 | 6.00 | 0.04 | 50 | 6.64 | 6.82 | 6.96 |
| 9729 | 9729_st2 | | | | | | | | |
| hsa-asg- | hsa-asg- | 5.68 | 6.19 | 5.94 | 0.36 | 0 | 6.61 | 6.46 | 6.75 |
| 6675 | 6675_st1 | | | | | | | | |
| hsa-asg- | hsa-asg- | 7.48 | 7.40 | 7.44 | 0.06 | 100 | 7.99 | 8.18 | 7.69 |
| 1813 | 1813_st2 | | | | | | | | |
| hsa-asg- | hsa-asg- | 5.79 | 5.63 | 5.71 | 0.11 | 0 | 6.35 | 6.35 | 6.39 |
| 8562 | 8562_st1 | | | | | | | | |
| hsa-asg- | hsa-asg- | 6.74 | 6.82 | 6.78 | 0.05 | 100 | 6.74 | 7.67 | 7.77 |
| 11479 | 11479_st2 | | | | | | | | |
| hsa-asg- | hsa-asg- | 8.60 | 8.51 | 8.55 | 0.06 | 0 | 9.11 | 9.03 | 8.99 |
| 5379 | 5379_st2 | | | | | | | | |
| hsa-asg- | hsa-asg- | 5.60 | 5.52 | 5.56 | 0.05 | 0 | 5.91 | 5.87 | 6.71 |
| 11563 | 11563_st2 | | | | | | | | |
| hsa-asg- | hsa-asg- | 6.64 | 6.39 | 6.52 | 0.18 | 100 | 7.21 | 7.20 | 7.17 |
| 2131 | 2131_st2 | | | | | | | | |
| hsa-asg- | hsa-asg- | 6.39 | 5.66 | 6.03 | 0.52 | 50 | 6.64 | 6.68 | 7.01 |
| 5289 | 5289_st2 | | | | | | | | |
| hsa-asg- | hsa-asg- | 6.05 | 5.83 | 5.94 | 0.15 | 0 | 6.39 | 6.78 | 7.06 |
| 8565 | 8565_st1 | | | | | | | | |
| hsa-asg- | hsa-asg- | 5.07 | 5.05 | 5.06 | 0.01 | 0 | 5.57 | 5.52 | 5.75 |
| 4599 | 4599_st1 | | | | | | | | |
| hsa-asg- | hsa-asg- | 5.41 | 5.43 | 5.42 | 0.01 | 0 | 5.64 | 6.15 | 6.57 |
| 3340 | 3340_st2 | | | | | | | | |
| hsa-asg- | hsa-asg- | 5.41 | 5.97 | 5.69 | 0.39 | 0 | 6.39 | 6.28 | 6.30 |
| 3694 | 3694_st1 | | | | | | | | |
| hsa-asg- | hsa-asg- | 11.92 | 11.41 | 11.66 | 0.36 | 100 | 12.17 | 12.52 | 12.61 |
| 9530 | 9530_st2 | | | | | | | | |
| hsa-asg- | hsa-asg- | 7.46 | 7.04 | 7.25 | 0.29 | 100 | 7.58 | 8.08 | 8.06 |
| 5085 | 5085_st2 | | | | | | | | |
| hsa-asg- | hsa-asg- | 6.29 | 6.00 | 6.14 | 0.20 | 0 | 6.56 | 7.00 | 6.96 |
| 2588 | 2588_st1 | | | | | | | | |
| hsa-asg- | hsa-asg- | 6.48 | 6.15 | 6.31 | 0.23 | 100 | 6.78 | 7.18 | 7.10 |
| 5061 | 5061_st1 | | | | | | | | |
| hsa-asg- | hsa-asg- | 7.43 | 7.40 | 7.42 | 0.02 | 0 | 8.36 | 7.91 | 7.99 |
| 11155 | 11155_st1 | | | | | | | | |
| hsa-asg- | hsa-asg- | 3.52 | 3.05 | 3.28 | 0.33 | 0 | 4.08 | 3.88 | 4.05 |
| 8672 | 8672_st1 | | | | | | | | |
| hsa-asg- | hsa-asg- | 6.56 | 5.99 | 6.27 | 0.40 | 50 | 6.63 | 7.00 | 7.14 |
| 1576 | 1576_st1 | | | | | | | | |
| hsa-asg- | hsa-asg- | 5.81 | 5.36 | 5.59 | 0.32 | 0 | 5.55 | 6.17 | 6.49 |
| 7730 | 7730_st2 | | | | | | | | |
| hsa-asg- | hsa-asg- | 9.32 | 8.80 | 9.06 | 0.37 | 50 | 10.04 | 9.84 | 9.80 |
| 12247 | 12247_st2 | | | | | | | | |
| hsa-asg- | hsa-asg- | 6.49 | 6.55 | 6.52 | 0.04 | 100 | 6.86 | 7.10 | 7.00 |
| 9511 | 9511_st2 | | | | | | | | |
| hsa-asg- | hsa-asg- | 5.19 | 5.39 | 5.29 | 0.14 | 0 | 5.95 | 6.14 | 5.93 |
| 8959 | 8959_st2 | | | | | | | | |
| hsa-asg-797 | hsa-asg- | 4.75 | 4.43 | 4.59 | 0.22 | 0 | 5.33 | 5.36 | 5.13 |
| | 797_st2 | | | | | | | | |
| hsa-asg-271 | hsa-asg- | 3.71 | 3.74 | 3.73 | 0.02 | 0 | 4.20 | 4.51 | 4.28 |
| | 271_st1 | | | | | | | | |
| hsa-asg- | hsa-asg- | 11.20 | 10.32 | 10.76 | 0.62 | 100 | 11.21 | 11.69 | 11.59 |
| 2750 | 2750_st2 | | | | | | | | |
| hsa-asg- | hsa-asg- | 5.84 | 5.31 | 5.57 | 0.38 | 0 | 6.06 | 6.37 | 6.60 |
| 2693 | 2693_st1 | | | | | | | | |
| hsa-asg-53 | hsa-asg- | 9.00 | 9.21 | 9.11 | 0.15 | 100 | 9.81 | 9.77 | 9.80 |
| | 53_st2 | | | | | | | | |
| hsa-asg- | hsa-asg- | 8.23 | 9.03 | 8.63 | 0.56 | 100 | 9.13 | 9.16 | 9.36 |
| 5032 | 5032_st2 | | | | | | | | |
| hsa-asg- | hsa-asg- | 6.79 | 6.22 | 6.51 | 0.41 | 50 | 7.17 | 7.19 | 7.20 |
| 6892 | 6892_st2 | | | | | | | | |
| hsa-asg- | hsa-asg- | 6.11 | 6.38 | 6.25 | 0.19 | 50 | 6.77 | 7.10 | 6.68 |
| 1911 | 1911_st1 | | | | | | | | |
| hsa-asg- | hsa-asg- | 5.54 | 6.44 | 5.99 | 0.64 | 50 | 6.53 | 6.12 | 6.78 |
| 8675 | 8675_st1 | | | | | | | | |
| hsa-asg-809 | hsa-asg- | 5.30 | 5.55 | 5.43 | 0.18 | 0 | 5.62 | 6.26 | 6.23 |
| | 809_st2 | | | | | | | | |
| hsa-asg- | hsa-asg- | 7.56 | 6.67 | 7.12 | 0.63 | 100 | 7.64 | 7.81 | 7.92 |
| 11893 | 11893_st2 | | | | | | | | |
| hsa-asg- | hsa-asg- | 7.69 | 6.65 | 7.17 | 0.74 | 100 | 7.67 | 8.01 | 7.84 |
| 1861 | 1861_st1 | | | | | | | | |
| hsa-asg- | hsa-asg- | 5.37 | 5.46 | 5.42 | 0.06 | 50 | 6.46 | 5.93 | 6.57 |
| 6651 | 6651_st2 | | | | | | | | |
| hsa-asg-471 | hsa-asg- | 7.27 | 7.54 | 7.41 | 0.19 | 0 | 8.03 | 8.17 | 8.19 |
| | 471_st1 | | | | | | | | |
| hsa-asg- | hsa-asg- | 5.27 | 5.03 | 5.15 | 0.17 | 0 | 5.62 | 6.28 | 6.43 |
| 10861 | 10861_st2 | | | | | | | | |
| hsa-asg- | hsa-asg- | 7.88 | 7.63 | 7.75 | 0.18 | 100 | 8.30 | 8.52 | 8.63 |
| 4310 | 4310_st1 | | | | | | | | |
| hsa-asg- | hsa-asg- | 7.18 | 7.33 | 7.25 | 0.10 | 100 | 7.40 | 8.27 | 8.68 |
| 7153 | 7153_st2 | | | | | | | | |
| hsa-asg- | hsa-asg- | 4.64 | 5.21 | 4.93 | 0.40 | 0 | 5.60 | 5.75 | 5.95 |
| 6879 | 6879_st1 | | | | | | | | |
| hsa-asg- | hsa-asg- | 5.07 | 5.38 | 5.22 | 0.22 | 0 | 5.89 | 6.31 | 5.98 |
| 7352 | 7352_st1 | | | | | | | | |
| hsa-asg- | hsa-asg- | 6.60 | 6.65 | 6.63 | 0.04 | 100 | 7.41 | 7.98 | 7.34 |
| 12775 | 12775_st1 | | | | | | | | |
| hsa-asg- | hsa-asg- | 7.30 | 6.85 | 7.08 | 0.32 | 100 | 7.93 | 7.89 | 8.08 |
| 13613 | 13613_st2 | | | | | | | | |
| hsa-asg- | hsa-asg- | 1.61 | 2.23 | 1.92 | 0.43 | 0 | 3.11 | 2.31 | 2.82 |
| 9748 | 9748_st1 | | | | | | | | |
| hsa-asg- | hsa-asg- | 6.36 | 5.77 | 6.06 | 0.42 | 50 | 6.71 | 6.93 | 6.77 |
| 7640 | 7640_st2 | | | | | | | | |
| hsa-asg- | hsa-asg- | 5.94 | 6.20 | 6.07 | 0.19 | 0 | 6.96 | 6.55 | 6.82 |
| 10971 | 10971_st2 | | | | | | | | |
| hsa-asg- | hsa-asg- | 8.17 | 8.80 | 8.49 | 0.44 | 0 | 9.33 | 9.32 | 8.96 |
| 6092 | 6092_st2 | | | | | | | | |
| hsa-asg-813 | hsa-asg- | 4.64 | 4.61 | 4.63 | 0.02 | 0 | 5.30 | 5.46 | 5.81 |
| | 813_st2 | | | | | | | | |
| hsa-asg- | hsa-asg- | 6.78 | 6.74 | 6.76 | 0.03 | 100 | 7.41 | 7.55 | 7.76 |
| 6437 | 6437_st1 | | | | | | | | |
| hsa-asg- | hsa-asg- | 7.38 | 7.47 | 7.43 | 0.06 | 100 | 8.25 | 8.49 | 8.30 |
| 12946 | 12946_st1 | | | | | | | | |
| hsa-asg- | hsa-asg- | 7.69 | 7.66 | 7.67 | 0.02 | 100 | 8.50 | 8.40 | 8.33 |
| 6948 | 6948_st2 | | | | | | | | |
| hsa-asg- | hsa-asg- | 7.08 | 6.56 | 6.82 | 0.37 | 0 | 7.72 | 7.21 | 7.84 |
| 11486 | 11486_st1 | | | | | | | | |
| hsa-cand711 | hsa- | 9.10 | 9.13 | 9.11 | 0.02 | 50 | 9.89 | 9.84 | 9.99 |
| | cand711_st1 | | | | | | | | |
| hsa-cand588 | hsa- | 5.91 | 5.66 | 5.79 | 0.18 | 0 | 6.93 | 6.16 | 6.88 |
| | cand588_st1 | | | | | | | | |
| hsa-asg-555 | hsa-asg- | 6.78 | 5.89 | 6.34 | 0.63 | 50 | 6.58 | 7.15 | 7.10 |
| | 555_st1 | | | | | | | | |
| hsa-asg- | hsa-asg- | 6.94 | 6.90 | 6.92 | 0.02 | 0 | 7.80 | 7.41 | 7.52 |
| 6149 | 6149_st2 | | | | | | | | |
| hsa-asg- | hsa-asg- | 7.29 | 6.47 | 6.88 | 0.58 | 0 | 7.41 | 7.78 | 7.54 |
| 9920 | 9920_st1 | | | | | | | | |
| hsa-asg- | hsa-asg- | 6.71 | 5.85 | 6.28 | 0.61 | 50 | 7.14 | 7.04 | 7.25 |
| 1391 | 1391_st1 | | | | | | | | |
| hsa-asg- | hsa-asg- | 5.98 | 6.38 | 6.18 | 0.28 | 50 | 7.03 | 6.43 | 6.89 |
| 3150 | 3150_st1 | | | | | | | | |
| hsa-asg- | hsa-asg- | 6.41 | 5.83 | 6.12 | 0.41 | 50 | 6.79 | 6.89 | 7.57 |
| 13829 | 13829_st2 | | | | | | | | |
| hsa-asg- | hsa-asg- | 6.09 | 5.71 | 5.90 | 0.27 | 0 | 5.98 | 6.73 | 6.64 |
| 9382 | 9382_st2 | | | | | | | | |
| hsa-cand855 | hsa- | 5.68 | 6.13 | 5.91 | 0.32 | 0 | 6.18 | 6.83 | 6.90 |
| | cand855_st1 | | | | | | | | |
| hsa-asg- | hsa-asg- | 7.05 | 7.15 | 7.10 | 0.07 | 100 | 7.91 | 7.99 | 7.96 |
| 10716 | 10716_st1 | | | | | | | | |
| hsa-asg- | hsa-asg- | 7.96 | 7.83 | 7.90 | 0.10 | 100 | 8.49 | 9.03 | 8.80 |
| 11698 | 11698_st2 | | | | | | | | |
| hsa-cand902 | hsa- | 5.27 | 5.11 | 5.19 | 0.11 | 0 | 5.55 | 6.08 | 6.34 |
| | cand902_st1 | | | | | | | | |
| hsa-asg- | hsa-asg- | 8.37 | 8.10 | 8.24 | 0.19 | 100 | 9.23 | 9.50 | 9.14 |
| 12919 | 12919_st2 | | | | | | | | |
| hsa-asg- | hsa-asg- | 4.41 | 4.43 | 4.42 | 0.02 | 0 | 5.38 | 5.22 | 4.98 |
| 4261 | 4261_st1 | | | | | | | | |
| hsa-asg- | hsa-asg- | 6.19 | 6.41 | 6.30 | 0.15 | 50 | 7.28 | 7.20 | 7.20 |
| 1153 | 1153_st1 | | | | | | | | |
| hsa-asg- | hsa-asg- | 6.00 | 5.01 | 5.51 | 0.70 | 0 | 6.37 | 6.18 | 6.72 |
| 3841 | 3841_st2 | | | | | | | | |
| hsa-asg- | hsa-asg- | 10.83 | 10.20 | 10.52 | 0.45 | 100 | 10.96 | 11.77 | 11.58 |
| 3231 | 3231_st2 | | | | | | | | |
| hsa-asg-225 | hsa-asg- | 4.85 | 4.26 | 4.56 | 0.41 | 0 | 5.27 | 5.14 | 5.09 |
| | 225_st1 | | | | | | | | |
| hsa-asg- | hsa-asg- | 7.26 | 6.73 | 6.99 | 0.37 | 100 | 7.74 | 7.52 | 7.95 |
| 2017 | 2017_st2 | | | | | | | | |
| hsa-asg- | hsa-asg- | 6.48 | 6.32 | 6.40 | 0.11 | 100 | 7.20 | 6.99 | 7.15 |
| 6623 | 6623_st2 | | | | | | | | |
| hsa-asg- | hsa-asg- | 4.94 | 4.87 | 4.91 | 0.05 | 0 | 5.69 | 5.85 | 5.52 |
| 9526 | 9526_st2 | | | | | | | | |
| hsa-asg- | hsa-asg- | 4.99 | 4.92 | 4.95 | 0.05 | 0 | 5.41 | 6.03 | 6.50 |
| 3014 | 3014_st2 | | | | | | | | |
| hsa-asg- | hsa-asg- | 6.97 | 7.01 | 6.99 | 0.03 | 100 | 7.21 | 8.21 | 8.48 |
| 12957 | 12957_st1 | | | | | | | | |
| hsa-asg- | hsa-asg- | 4.05 | 3.55 | 3.80 | 0.36 | 0 | 4.67 | 5.06 | 5.11 |
| 2564 | 2564_st2 | | | | | | | | |
| hsa-asg- | hsa-asg- | 4.34 | 5.23 | 4.79 | 0.63 | 0 | 5.80 | 5.88 | 5.70 |
| 10473 | 10473_st1 | | | | | | | | |
| hsa-asg- | hsa-asg- | 2.58 | 2.99 | 2.79 | 0.29 | 0 | 3.30 | 3.79 | 3.08 |
| 8303 | 8303_st2 | | | | | | | | |
| hsa-asg- | hsa-asg- | 5.03 | 5.55 | 5.29 | 0.37 | 50 | 6.06 | 6.48 | 6.91 |
| 11310 | 11310_st2 | | | | | | | | |
| hsa-asg- | hsa-asg- | 5.91 | 5.79 | 5.85 | 0.08 | 0 | 6.63 | 7.49 | 6.51 |
| 6831 | 6831_st2 | | | | | | | | |
| hsa-asg- | hsa-asg- | 7.15 | 6.72 | 6.94 | 0.30 | 0 | 7.19 | 8.37 | 8.50 |
| 11373 | 11373_st1 | | | | | | | | |
| hsa-asg- | hsa-asg- | 6.00 | 6.18 | 6.09 | 0.12 | 0 | 6.80 | 6.90 | 7.49 |
| 6005 | 6005_st1 | | | | | | | | |
| hsa-asg- | hsa-asg- | 8.41 | 9.02 | 8.72 | 0.43 | 0 | 9.52 | 9.57 | 9.59 |
| 4654 | 4654_st1 | | | | | | | | |
| hsa-asg- | hsa-asg- | 7.73 | 7.35 | 7.54 | 0.27 | 100 | 7.94 | 8.32 | 9.26 |
| 9403 | 9403_st2 | | | | | | | | |
| hsa-asg- | hsa-asg- | 7.75 | 7.64 | 7.70 | 0.07 | 100 | 8.93 | 8.38 | 8.31 |
| 7893 | 7893_st2 | | | | | | | | |
| hsa-asg- | hsa-asg- | 7.48 | 6.81 | 7.15 | 0.48 | 100 | 7.51 | 8.29 | 8.62 |
| 13000 | 13000_st1 | | | | | | | | |
| hsa-asg- | hsa-asg- | 6.00 | 5.86 | 5.93 | 0.10 | 50 | 6.32 | 7.51 | 7.23 |
| 10883 | 10883_st1 | | | | | | | | |
| hsa-asg- | hsa-asg- | 4.75 | 5.38 | 5.06 | 0.44 | 0 | 5.89 | 5.83 | 5.93 |
| 1689 | 1689_st2 | | | | | | | | |
| hsa-asg- | hsa-asg- | 6.57 | 5.59 | 6.08 | 0.70 | 50 | 6.49 | 7.32 | 7.52 |
| 9412 | 9412_st2 | | | | | | | | |
| hsa-asg- | hsa-asg- | 7.97 | 7.34 | 7.66 | 0.45 | 100 | 8.57 | 8.51 | 8.53 |
| 3271 | 3271_st1 | | | | | | | | |
| hsa-asg- | hsa-asg- | 6.71 | 5.95 | 6.33 | 0.54 | 50 | 7.40 | 7.21 | 7.75 |
| 13559 | 13559_st2 | | | | | | | | |
| hsa-asg- | hsa-asg- | 3.80 | 3.65 | 3.73 | 0.11 | 0 | 4.26 | 4.51 | 4.58 |
| 11898 | 11898_st2 | | | | | | | | |
| hsa-asg- | hsa-asg- | 3.31 | 3.55 | 3.43 | 0.17 | 0 | 4.08 | 4.39 | 4.32 |
| 3081 | 3081_st1 | | | | | | | | |
| hsa-asg- | hsa-asg- | 6.19 | 5.25 | 5.72 | 0.67 | 0 | 6.66 | 6.68 | 6.90 |
| 2858 | 2858_st1 | | | | | | | | |
| hsa-asg-278 | hsa-asg- | 4.64 | 5.31 | 4.97 | 0.47 | 0 | 5.07 | 6.30 | 5.91 |
| | 278_st1 | | | | | | | | |
| hsa-asg- | hsa-asg- | 7.67 | 7.92 | 7.80 | 0.18 | 100 | 8.63 | 8.64 | 8.76 |
| 5423 | 5423_st2 | | | | | | | | |
| hsa-asg- | hsa-asg- | 4.27 | 4.67 | 4.47 | 0.28 | 0 | 5.27 | 5.56 | 5.85 |
| 9257 | 9257_st2 | | | | | | | | |
| hsa-asg- | hsa-asg- | 6.15 | 5.71 | 5.93 | 0.31 | 50 | 6.44 | 7.32 | 7.10 |
| 10197 | 10197_st2 | | | | | | | | |
| hsa-asg- | hsa-asg- | 7.16 | 6.81 | 6.98 | 0.25 | 100 | 8.52 | 8.24 | 8.04 |
| 6507 | 6507_st2 | | | | | | | | |
| hsa-asg- | hsa-asg- | 5.84 | 5.11 | 5.48 | 0.51 | 0 | 6.52 | 6.59 | 6.91 |
| 9015 | 9015_st1 | | | | | | | | |
| hsa-asg- | hsa-asg- | 1.72 | 1.98 | 1.85 | 0.18 | 0 | 3.11 | 2.69 | 3.38 |
| 5460 | 5460_st2 | | | | | | | | |
| hsa-asg- | hsa-asg- | 8.95 | 9.11 | 9.03 | 0.12 | 100 | 10.96 | 10.10 | 9.65 |
| 13308 | 13308_st2 | | | | | | | | |
| hsa-asg- | hsa-asg- | 4.27 | 4.99 | 4.63 | 0.50 | 0 | 5.93 | 5.59 | 5.83 |
| 4440 | 4440_st1 | | | | | | | | |
| hsa-asg- | hsa-asg- | 6.41 | 5.52 | 5.97 | 0.63 | 100 | 7.01 | 7.15 | 7.05 |
| 1375 | 1375_st1 | | | | | | | | |
| hsa-asg- | hsa-asg- | 6.17 | 4.96 | 5.57 | 0.85 | 0 | 6.64 | 6.43 | 6.99 |
| 8763 | 8763_st2 | | | | | | | | |
| hsa-asg- | hsa-asg- | 8.47 | 8.68 | 8.58 | 0.15 | 100 | 9.33 | 9.90 | 10.51 |
| 2872 | 2872_st2 | | | | | | | | |
| hsa-asg- | hsa-asg- | 6.63 | 6.63 | 6.63 | 0.00 | 100 | 7.45 | 8.42 | 8.20 |
| 12460 | 12460_st2 | | | | | | | | |
| hsa-asg- | hsa-asg- | 5.03 | 5.43 | 5.23 | 0.28 | 0 | 6.18 | 5.74 | 6.72 |
| 8138 | 8138_st2 | | | | | | | | |
| hsa-asg- | hsa-asg- | 9.09 | 9.11 | 9.10 | 0.01 | 100 | 11.02 | 10.13 | 9.94 |
| 5304 | 5304_st1 | | | | | | | | |
| hsa-asg- | hsa-asg- | 5.89 | 4.49 | 5.19 | 0.99 | 0 | 6.20 | 6.03 | 6.45 |
| 4971 | 4971_st1 | | | | | | | | |
| hsa-asg- | hsa-asg- | 5.91 | 6.38 | 6.15 | 0.33 | 50 | 7.20 | 7.06 | 7.39 |
| 9343 | 9343_st1 | | | | | | | | |
| hsa-asg- | hsa-asg- | 5.07 | 5.17 | 5.12 | 0.07 | 0 | 6.02 | 6.24 | 6.38 |
| 8271 | 8271_st2 | | | | | | | | |
| hsa-asg- | hsa-asg- | 7.43 | 6.67 | 7.05 | 0.54 | 100 | 8.64 | 8.29 | 8.56 |
| 13260 | 13260_st1 | | | | | | | | |
| hsa-asg- | hsa-asg- | 4.34 | 4.23 | 4.29 | 0.08 | 0 | 5.41 | 5.90 | 4.55 |
| 12105 | 12105_st2 | | | | | | | | |
| hsa-asg- | hsa-asg- | 3.20 | 2.42 | 2.81 | 0.55 | 0 | 3.56 | 4.97 | 3.88 |
| 7685 | 7685_st2 | | | | | | | | |
| hsa-asg- | hsa-asg- | 5.79 | 5.55 | 5.67 | 0.17 | 0 | 7.37 | 6.62 | 6.68 |
| 3360 | 3360_st2 | | | | | | | | |
| hsa-asg- | hsa-asg- | 5.37 | 4.19 | 4.78 | 0.83 | 0 | 5.36 | 6.42 | 6.50 |
| 5576 | 5576_st1 | | | | | | | | |
| hsa-asg- | hsa-asg- | 5.27 | 4.04 | 4.66 | 0.87 | 0 | 5.49 | 6.28 | 5.85 |
| 4843 | 4843_st2 | | | | | | | | |
| hsa-asg- | hsa-asg- | 5.27 | 4.49 | 4.88 | 0.55 | 0 | 5.71 | 6.22 | 7.15 |
| 7009 | 7009_st1 | | | | | | | | |
| hsa-asg- | hsa-asg- | 3.08 | 4.40 | 3.74 | 0.93 | 0 | 4.76 | 5.14 | 5.47 |
| 8928 | 8928_st2 | | | | | | | | |
| hsa-asg- | hsa-asg- | 3.97 | 4.72 | 4.35 | 0.53 | 0 | 5.07 | 5.49 | 5.58 |
| 12777 | 12777_st2 | | | | | | | | |
| hsa-asg- | hsa-asg- | 5.23 | 4.61 | 4.92 | 0.44 | 0 | 5.71 | 6.55 | 7.09 |
| 7069 | 7069_st1 | | | | | | | | |
| hsa-cand965 | hsa- | 6.64 | 5.19 | 5.92 | 1.02 | 0 | 7.25 | 7.94 | 7.66 |
| | cand965_st1 | | | | | | | | |
| hsa-asg- | hsa-asg- | 5.27 | 4.08 | 4.67 | 0.84 | 0 | 5.80 | 6.12 | 6.29 |
| 13693 | 13693_st2 | | | | | | | | |
| hsa-asg- | hsa-asg- | 5.03 | 4.26 | 4.65 | 0.54 | 0 | 6.06 | 6.18 | 6.03 |
| 8329 | 8329_st1 | | | | | | | | |
| hsa-asg- | hsa-asg- | 5.65 | 4.96 | 5.31 | 0.49 | 0 | 5.89 | 6.67 | 6.69 |
| 3597 | 3597_st2 | | | | | | | | |
| hsa-asg- | hsa-asg- | 5.30 | 3.92 | 4.61 | 0.98 | 0 | 5.55 | 6.43 | 6.33 |
| 9852 | 9852_st1 | | | | | | | | |
| hsa-asg- | hsa-asg- | 3.31 | 2.61 | 2.96 | 0.49 | 0 | 4.53 | 4.39 | 3.97 |
| 3107 | 3107_st1 | | | | | | | | |
| hsa-asg- | hsa-asg- | 10.81 | 10.39 | 10.60 | 0.30 | 100 | 12.93 | 11.30 | 12.11 |
| 14245 | 14245_st1 | | | | | | | | |
| hsa-asg- | hsa-asg- | 5.07 | 4.08 | 4.58 | 0.70 | 0 | 5.85 | 6.08 | 6.31 |
| 6949 | 6949_st1 | | | | | | | | |
| hsa-asg- | hsa-asg- | 4.41 | 3.65 | 4.03 | 0.54 | 0 | 5.64 | 5.29 | 5.49 |
| 7319 | 7319_st2 | | | | | | | | |
| hsa-asg- | hsa-asg- | 5.34 | 4.23 | 4.78 | 0.78 | 0 | 6.75 | 5.82 | 6.66 |
| 9022 | 9022_st2 | | | | | | | | |
| hsa-asg- | hsa-asg- | 4.80 | 4.89 | 4.85 | 0.07 | 0 | 6.58 | 5.93 | 6.39 |
| 12246 | 12246_st2 | | | | | | | | |
| hsa-asg- | hsa-asg- | 5.84 | 5.91 | 5.87 | 0.05 | 0 | 6.44 | 8.01 | 8.09 |
| 8917 | 8917_st2 | | | | | | | | |
| hsa-asg- | hsa-asg- | 4.94 | 5.55 | 5.25 | 0.43 | 0 | 7.74 | 7.02 | 7.09 |
| 13244 | 13244_st1 | | | | | | | | |
| hsa-cand345 | hsa- | 4.75 | 4.23 | 4.49 | 0.37 | 0 | 6.31 | 5.64 | 5.72 |
| | cand345_st1 | | | | | | | | |
| hsa-asg- | hsa-asg- | 4.99 | 6.40 | 5.69 | 1.00 | 50 | 7.42 | 7.02 | 8.57 |
| 12702 | 12702_st1 | | | | | | | | |
| hsa-asg- | hsa-asg- | 5.68 | 4.67 | 5.17 | 0.72 | 0 | 7.14 | 7.01 | 6.73 |
| 13230 | 13230_st2 | | | | | | | | |
| hsa-asg- | hsa-asg- | 4.59 | 5.70 | 5.14 | 0.79 | 50 | 7.71 | 7.34 | 6.61 |
| 12902 | 12902_st1 | | | | | | | | |
| hsa-asg- | hsa-asg- | 6.00 | 4.92 | 5.46 | 0.77 | 0 | 7.44 | 6.96 | 7.26 |
| 13237 | 13237_st1 | | | | | | | | |
| hsa-asg- | hsa-asg- | 5.54 | 5.21 | 5.37 | 0.23 | 0 | 5.85 | 7.63 | 7.94 |
| 4002 | 4002_st1 | | | | | | | | |
| hsa-asg-21 | hsa-asg- | 5.11 | 3.45 | 4.28 | 1.18 | 0 | 5.67 | 5.83 | 6.89 |
| | 21_st2 | | | | | | | | |
| hsa-asg- | hsa-asg- | 6.21 | 5.46 | 5.84 | 0.53 | 0 | 7.38 | 7.72 | 8.38 |
| 10149 | 10149_st1 | | | | | | | | |
| hsa-asg- | hsa-asg- | 6.39 | 3.88 | 5.14 | 1.78 | 50 | 6.51 | 7.95 | 6.78 |
| 5303 | 5303_st1 | | | | | | | | |
| hsa-asg- | hsa-asg- | 5.47 | 3.34 | 4.41 | 1.51 | 0 | 6.16 | 6.85 | 7.05 |
| 10666 | 10666_st1 | | | | | | | | |
| hsa-asg-335 | hsa-asg- | 5.86 | 6.02 | 5.94 | 0.11 | 50 | 6.63 | 8.54 | 8.65 |
| | 335_st1 | | | | | | | | |
| hsa-asg- | hsa-asg- | 3.97 | 4.49 | 4.23 | 0.37 | 0 | 5.38 | 6.36 | 6.71 |
| 6250 | 6250_st2 | | | | | | | | |
| hsa-asg- | hsa-asg- | 4.27 | 3.92 | 4.10 | 0.25 | 0 | 5.44 | 6.38 | 6.78 |
| 8208 | 8208_st1 | | | | | | | | |
| hsa-asg- | hsa-asg- | 5.65 | 5.83 | 5.74 | 0.13 | 50 | 6.32 | 8.35 | 8.75 |
| 10387 | 10387_st1 | | | | | | | | |
| hsa-asg- | hsa-asg- | 7.17 | 7.07 | 7.12 | 0.07 | 100 | 9.94 | 8.87 | 8.61 |
| 13248 | 13248_st1 | | | | | | | | |
| hsa-asg- | hsa-asg- | 4.34 | 2.74 | 3.54 | 1.13 | 0 | 4.48 | 6.12 | 6.27 |
| 12079 | 12079_st1 | | | | | | | | |
| hsa-asg- | hsa-asg- | 5.91 | 4.96 | 5.44 | 0.67 | 50 | 7.15 | 7.23 | 7.47 |
| 4557 | 4557_st2 | | | | | | | | |
| hsa-asg- | hsa-asg- | 8.00 | 5.49 | 6.75 | 1.78 | 50 | 8.27 | 9.59 | 9.28 |
| 13937 | 13937_st1 | | | | | | | | |
| hsa-miR165 | hsa- | 4.20 | 2.55 | 3.38 | 1.17 | 0 | 4.80 | 5.14 | 5.47 |
| | miR165_st1 | | | | | | | | |
| hsa-asg- | hsa-asg- | 4.80 | 4.00 | 4.40 | 0.56 | 0 | 4.92 | 7.43 | 7.55 |
| 8682 | 8682_st2 | | | | | | | | |
| hsa-asg- | hsa-asg- | 4.20 | 2.68 | 3.44 | 1.08 | 0 | 5.07 | 5.95 | 6.52 |
| 6413 | 6413_st2 | | | | | | | | |
| hsa-asg- | hsa-asg- | 5.07 | 3.55 | 4.31 | 1.08 | 0 | 6.15 | 6.40 | 7.12 |
| 13304 | 13304_st2 | | | | | | | | |
| hsa-asg- | hsa-asg- | 2.84 | 4.43 | 3.63 | 1.13 | 0 | 4.37 | 6.59 | 6.40 |
| 4205 | 4205_st2 | | | | | | | | |
| hsa-asg-870 | hsa-asg- | 3.97 | 3.39 | 3.68 | 0.41 | 0 | 4.37 | 6.85 | 7.49 |
| | 870_st1 | | | | | | | | |
| hsa-asg- | hsa-asg- | 8.77 | 6.85 | 7.81 | 1.35 | 50 | 9.87 | 10.31 | 10.51 |
| 7074 | 7074_st1 | | | | | | | | |
| hsa-asg- | hsa-asg- | 6.43 | 3.45 | 4.94 | 2.11 | 50 | 8.09 | 7.42 | 7.28 |
| 13279 | 13279_st1 | | | | | | | | |
| hsa-asg- | hsa-asg- | 9.47 | 11.07 | 10.27 | 1.13 | 100 | 3.20 | 5.22 | 3.02 |
| 5638 | 5638_st2 | | | | | | | | |
| hsa-asg- | hsa-asg- | 7.15 | 9.46 | 8.30 | 1.63 | 100 | 4.32 | 3.88 | 3.54 |
| 11338 | 11338_st2 | | | | | | | | |
| hsa-asg- | hsa-asg- | 6.83 | 9.45 | 8.14 | 1.85 | 100 | 6.46 | 4.19 | 3.02 |
| 5630 | 5630_st2 | | | | | | | | |
| hsa-asg- | hsa-asg- | 6.97 | 4.49 | 5.73 | 1.75 | 50 | 3.01 | 2.57 | 3.49 |
| 13997 | 13997_st2 | | | | | | | | |
| hsa-asg- | hsa-asg- | 6.75 | 4.72 | 5.74 | 1.44 | 100 | 3.01 | 3.06 | 2.76 |
| 8428 | 8428_st2 | | | | | | | | |
| hsa-asg- | hsa-asg- | 7.60 | 8.05 | 7.82 | 0.32 | 100 | 4.26 | 6.07 | 5.35 |
| 9186 | 9186_st1 | | | | | | | | |
| hsa-asg- | hsa-asg- | 6.52 | 4.64 | 5.58 | 1.33 | 50 | 3.20 | 2.94 | 2.62 |
| 1296 | 1296_st1 | | | | | | | | |
| hsa-asg- | hsa-asg- | 5.74 | 5.05 | 5.39 | 0.48 | 100 | 3.01 | 3.29 | 2.36 |
| 9723 | 9723_st2 | | | | | | | | |
| hsa-asg- | hsa-asg- | 6.09 | 4.55 | 5.32 | 1.09 | 50 | 2.80 | 2.69 | 3.59 |
| 11380 | 11380_st2 | | | | | | | | |
| hsa-asg- | hsa-asg- | 4.47 | 6.30 | 5.39 | 1.30 | 50 | 3.11 | 3.40 | 3.08 |
| 2261 | 2261_st1 | | | | | | | | |
| hsa-asg- | hsa-asg- | 8.07 | 9.09 | 8.58 | 0.72 | 100 | 5.74 | 6.92 | 7.20 |
| 1519 | 1519_st1 | | | | | | | | |
| hsa-asg- | hsa-asg- | 5.91 | 4.43 | 5.17 | 1.05 | 50 | 3.11 | 3.06 | 4.13 |
| 1794 | 1794_st1 | | | | | | | | |
| hsa-asg- | hsa-asg- | 6.25 | 6.91 | 6.58 | 0.47 | 50 | 4.48 | 4.51 | 4.49 |
| 12271 | 12271_st1 | | | | | | | | |
| hsa-asg- | hsa-asg- | 5.44 | 7.37 | 6.41 | 1.37 | 50 | 3.80 | 3.70 | 4.39 |
| 14208 | 14208_st1 | | | | | | | | |
| hsa-asg- | hsa-asg- | 4.53 | 6.90 | 5.71 | 1.68 | 50 | 3.72 | 3.70 | 3.14 |
| 8486 | 8486_st2 | | | | | | | | |
| hsa-asg- | hsa-asg- | 10.46 | 10.75 | 10.61 | 0.20 | 100 | 8.43 | 8.50 | 9.42 |
| 5640 | 5640_st1 | | | | | | | | |
| hsa-cand317 | hsa- | 6.62 | 4.61 | 5.61 | 1.42 | 50 | 3.48 | 4.19 | 2.76 |
| | cand317_st1 | | | | | | | | |
| hsa-asg- | hsa-asg- | 4.59 | 5.46 | 5.02 | 0.62 | 50 | 3.48 | 3.88 | 3.02 |
| 2335 | 2335_st1 | | | | | | | | |
| hsa-asg- | hsa-asg- | 5.79 | 3.55 | 4.67 | 1.58 | 50 | 3.30 | 3.29 | 3.02 |
| 1587 | 1587_st1 | | | | | | | | |
| hsa-asg- | hsa-asg- | 5.62 | 6.32 | 5.97 | 0.49 | 50 | 4.26 | 3.83 | 4.83 |
| 4803 | 4803_st2 | | | | | | | | |
| hsa-asg- | hsa-asg- | 10.94 | 10.80 | 10.87 | 0.10 | 100 | 9.51 | 8.48 | 9.66 |
| 13278 | 13278_st2 | | | | | | | | |
| hsa-asg-497 | hsa-asg- | 7.46 | 7.19 | 7.33 | 0.19 | 100 | 5.71 | 5.67 | 5.80 |
| | 497_st2 | | | | | | | | |
| hsa-asg- | hsa-asg- | 5.37 | 6.00 | 5.69 | 0.44 | 0 | 3.11 | 4.22 | 5.02 |
| 9796 | 9796_st1 | | | | | | | | |
| hsa-asg- | hsa-asg- | 6.39 | 4.55 | 5.47 | 1.30 | 50 | 4.58 | 3.29 | 3.93 |
| 10031 | 10031_st1 | | | | | | | | |
| hsa-asg- | hsa-asg- | 6.00 | 5.55 | 5.78 | 0.32 | 50 | 4.37 | 4.33 | 3.74 |
| 9980 | 9980_st1 | | | | | | | | |
| hsa-asg- | hsa-asg- | 4.94 | 6.89 | 5.91 | 1.37 | 50 | 4.32 | 4.26 | 4.46 |
| 12453 | 12453_st2 | | | | | | | | |
| hsa-asg- | hsa-asg- | 7.71 | 5.70 | 6.70 | 1.42 | 50 | 5.07 | 4.79 | 5.45 |
| 11489 | 11489_st1 | | | | | | | | |
| hsa-asg- | hsa-asg- | 4.90 | 4.72 | 4.81 | 0.12 | 0 | 2.90 | 3.18 | 3.38 |
| 11361 | 11361_st2 | | | | | | | | |
| hsa-asg- | hsa-asg- | 7.18 | 6.67 | 6.93 | 0.36 | 100 | 5.14 | 5.02 | 5.40 |
| 12807 | 12807_st2 | | | | | | | | |
| hsa-asg- | hsa-asg- | 6.44 | 6.14 | 6.29 | 0.22 | 100 | 4.71 | 4.57 | 4.83 |
| 7511 | 7511_st2 | | | | | | | | |
| hsa-asg- | hsa-asg- | 6.93 | 5.21 | 6.07 | 1.21 | 50 | 4.84 | 4.88 | 5.07 |
| 9762 | 9762_st1 | | | | | | | | |
| hsa-asg- | hsa-asg- | 7.39 | 8.00 | 7.69 | 0.43 | 50 | 5.62 | 6.44 | 6.84 |
| 12372 | 12372_st2 | | | | | | | | |
| hsa-asg- | hsa-asg- | 9.22 | 8.68 | 8.95 | 0.38 | 100 | 8.20 | 6.66 | 8.11 |
| 4223 | 4223_st2 | | | | | | | | |
| hsa-asg- | hsa-asg- | 7.02 | 6.29 | 6.65 | 0.52 | 100 | 5.98 | 5.56 | 5.61 |
| 11402 | 11402_st1 | | | | | | | | |
| hsa-asg- | hsa-asg- | 7.79 | 7.46 | 7.62 | 0.23 | 100 | 6.52 | 6.33 | 6.46 |
| 8633 | 8633_st1 | | | | | | | | |
| hsa-asg- | hsa-asg- | 7.21 | 6.62 | 6.91 | 0.42 | 100 | 5.23 | 6.18 | 5.94 |
| 4780 | 4780_st1 | | | | | | | | |
| hsa-asg- | hsa-asg- | 6.98 | 6.99 | 6.98 | 0.01 | 100 | 5.47 | 5.84 | 5.79 |
| 9117 | 9117_st1 | | | | | | | | |
| hsa-asg- | hsa-asg- | 6.19 | 5.29 | 5.74 | 0.64 | 50 | 4.84 | 4.04 | 4.21 |
| 1362 | 1362_st2 | | | | | | | | |
| hsa-asg- | hsa-asg- | 10.75 | 10.40 | 10.57 | 0.25 | 100 | 8.77 | 9.78 | 9.09 |
| 14233 | 14233_st1 | | | | | | | | |
| hsa-asg- | hsa-asg- | 13.14 | 12.47 | 12.80 | 0.47 | 100 | 12.38 | 11.41 | 11.96 |
| 13309 | 13309_st2 | | | | | | | | |
| hsa-asg- | hsa-asg- | 8.42 | 7.09 | 7.76 | 0.94 | 100 | 6.86 | 6.57 | 6.69 |
| 13841 | 13841_st2 | | | | | | | | |
| hsa-asg- | hsa-asg- | 7.42 | 7.26 | 7.34 | 0.11 | 100 | 5.78 | 6.08 | 6.22 |
| 14001 | 14001_st1 | | | | | | | | |
| hsa-asg- | hsa-asg- | 5.65 | 5.64 | 5.65 | 0.01 | 50 | 4.58 | 5.14 | 4.80 |
| 12320 | 12320_st2 | | | | | | | | |
| hsa-asg- | hsa-asg- | 8.14 | 7.07 | 7.61 | 0.76 | 100 | 6.35 | 6.73 | 6.63 |
| 9227 | 9227_st1 | | | | | | | | |
| hsa-asg- | hsa-asg- | 7.30 | 7.00 | 7.15 | 0.21 | 100 | 5.97 | 6.18 | 6.36 |
| 7922 | 7922_st2 | | | | | | | | |
| hsa-asg- | hsa-asg- | 9.19 | 9.35 | 9.27 | 0.11 | 100 | 7.76 | 8.44 | 8.32 |
| 9261 | 9261_st1 | | | | | | | | |
| hsa-cand732 | hsa- | 7.47 | 8.16 | 7.82 | 0.49 | 100 | 6.44 | 6.34 | 6.99 |
| | cand732_st2 | | | | | | | | |
| hsa-asg- | hsa-asg- | 6.05 | 6.04 | 6.05 | 0.00 | 50 | 5.30 | 5.06 | 4.72 |
| 13924 | 13924_st1 | | | | | | | | |
| hsa-asg- | hsa-asg- | 5.84 | 5.46 | 5.65 | 0.27 | 0 | 4.14 | 4.97 | 4.83 |
| 2889 | 2889_st2 | | | | | | | | |
| hsa-asg- | hsa-asg- | 6.79 | 7.43 | 7.11 | 0.45 | 100 | 5.74 | 5.90 | 6.09 |
| 12381 | 12381_st1 | | | | | | | | |
| hsa-asg- | hsa-asg- | 7.36 | 7.75 | 7.56 | 0.28 | 100 | 6.53 | 6.64 | 6.31 |
| 8003 | 8003_st2 | | | | | | | | |
| hsa-asg- | hsa-asg- | 6.51 | 5.64 | 6.08 | 0.61 | 100 | 4.80 | 5.18 | 4.64 |
| 7262 | 7262_st1 | | | | | | | | |
| hsa-asg- | hsa-asg- | 10.31 | 11.71 | 11.01 | 0.99 | 100 | 9.65 | 9.98 | 10.04 |
| 11850 | 11850_st1 | | | | | | | | |
| hsa-asg- | hsa-asg- | 6.60 | 6.87 | 6.74 | 0.19 | 100 | 5.93 | 5.87 | 5.70 |
| 7027 | 7027_st2 | | | | | | | | |
| hsa-asg- | hsa-asg- | 8.58 | 9.10 | 8.84 | 0.37 | 100 | 7.89 | 7.38 | 8.02 |
| 12937 | 12937_st2 | | | | | | | | |
| hsa-asg-345 | hsa-asg- | 5.60 | 5.75 | 5.68 | 0.11 | 50 | 4.84 | 4.74 | 5.02 |
| | 345_st1 | | | | | | | | |
| hsa-asg- | hsa-asg- | 6.63 | 6.13 | 6.38 | 0.35 | 100 | 6.34 | 5.26 | 5.38 |
| 4969 | 4969_st2 | | | | | | | | |
| hsa-asg- | hsa-asg- | 6.92 | 5.88 | 6.40 | 0.73 | 50 | 5.17 | 5.64 | 5.64 |
| 3798 | 3798_st1 | | | | | | | | |
| hsa-asg- | hsa-asg- | 6.89 | 7.41 | 7.15 | 0.37 | 100 | 5.91 | 6.08 | 5.97 |
| 4703 | 4703_st2 | | | | | | | | |
| hsa-asg- | hsa-asg- | 4.59 | 3.55 | 4.07 | 0.73 | 0 | 3.48 | 2.19 | 2.95 |
| 8792 | 8792_st1 | | | | | | | | |
| hsa-asg- | hsa-asg- | 5.89 | 6.10 | 5.99 | 0.15 | 50 | 4.58 | 5.18 | 5.61 |
| 4460 | 4460_st2 | | | | | | | | |
| hsa-asg- | hsa-asg- | 7.83 | 8.30 | 8.06 | 0.33 | 100 | 6.57 | 7.31 | 7.25 |
| 4026 | 4026_st1 | | | | | | | | |
| hsa-cand421 | hsa- | 11.03 | 12.08 | 11.56 | 0.75 | 100 | 10.27 | 10.91 | 10.45 |
| | cand421_st1 | | | | | | | | |
| hsa-asg- | hsa-asg- | 8.43 | 8.61 | 8.52 | 0.13 | 100 | 6.97 | 7.90 | 7.97 |
| 3670 | 3670_st1 | | | | | | | | |
| hsa-asg- | hsa-asg- | 7.83 | 8.38 | 8.10 | 0.39 | 100 | 7.00 | 7.33 | 7.12 |
| 9130 | 9130_st2 | | | | | | | | |
| hsa-asg- | hsa-asg- | 5.65 | 6.97 | 6.31 | 0.93 | 50 | 5.57 | 5.43 | 5.85 |
| 7783 | 7783_st1 | | | | | | | | |
| hsa-asg- | hsa-asg- | 5.79 | 6.48 | 6.13 | 0.49 | 50 | 5.10 | 5.85 | 4.98 |
| 3944 | 3944_st1 | | | | | | | | |
| hsa-asg- | hsa-asg- | 5.74 | 5.83 | 5.78 | 0.07 | 50 | 4.53 | 5.14 | 4.88 |
| 13798 | 13798_st1 | | | | | | | | |
| hsa-asg- | hsa-asg- | 8.85 | 9.09 | 8.97 | 0.16 | 100 | 7.58 | 7.87 | 8.40 |
| 6870 | 6870_st1 | | | | | | | | |
| hsa-asg- | hsa-asg- | 5.41 | 6.00 | 5.70 | 0.42 | 50 | 4.20 | 4.93 | 4.72 |
| 2460 | 2460_st1 | | | | | | | | |
| hsa-asg- | hsa-asg- | 4.70 | 5.86 | 5.28 | 0.82 | 50 | 4.32 | 4.74 | 4.61 |
| 11267 | 11267_st2 | | | | | | | | |
| hsa-asg- | hsa-asg- | 6.48 | 6.11 | 6.29 | 0.26 | 100 | 5.23 | 5.43 | 5.31 |
| 3604 | 3604_st1 | | | | | | | | |
| hsa-asg- | hsa-asg- | 6.93 | 6.77 | 6.85 | 0.11 | 100 | 5.98 | 5.99 | 5.73 |
| 4296 | 4296_st1 | | | | | | | | |
| hsa-asg- | hsa-asg- | 8.56 | 9.33 | 8.95 | 0.54 | 100 | 7.81 | 8.41 | 8.26 |
| 8866 | 8866_st1 | | | | | | | | |
| hsa-asg- | hsa-asg- | 5.86 | 5.36 | 5.61 | 0.36 | 100 | 4.67 | 5.06 | 4.93 |
| 12471 | 12471_st1 | | | | | | | | |
| hsa-asg- | hsa-asg- | 8.55 | 7.89 | 8.22 | 0.46 | 100 | 7.07 | 7.29 | 7.77 |
| 11515 | 11515_st2 | | | | | | | | |
| hsa-asg- | hsa-asg- | 6.21 | 6.81 | 6.51 | 0.42 | 50 | 5.71 | 5.61 | 6.20 |
| 7252 | 7252_st1 | | | | | | | | |
| hsa-asg- | hsa-asg- | 6.52 | 6.52 | 6.52 | 0.00 | 100 | 6.31 | 5.64 | 6.14 |
| 11458 | 11458_st2 | | | | | | | | |
| hsa-asg- | hsa-asg- | 9.17 | 9.63 | 9.40 | 0.33 | 50 | 8.38 | 8.93 | 8.47 |
| 13453 | 13453_st1 | | | | | | | | |
| hsa-asg- | hsa-asg- | 9.98 | 10.07 | 10.02 | 0.07 | 100 | 9.11 | 9.16 | 9.23 |
| 3722 | 3722_st1 | | | | | | | | |
| hsa-asg- | hsa-asg- | 11.02 | 12.01 | 11.52 | 0.69 | 100 | 10.84 | 10.88 | 10.76 |
| 3992 | 3992_st2 | | | | | | | | |
| hsa-asg- | hsa-asg- | 6.75 | 7.24 | 7.00 | 0.35 | 100 | 6.54 | 6.44 | 6.23 |
| 4373 | 4373_st1 | | | | | | | | |
| hsa-asg- | hsa-asg- | 7.74 | 7.74 | 7.74 | 0.00 | 100 | 6.91 | 7.02 | 7.01 |
| 9480 | 9480_st1 | | | | | | | | |
| hsa-asg- | hsa-asg- | 12.87 | 13.60 | 13.24 | 0.52 | 100 | 12.55 | 12.77 | 12.46 |
| 7939 | 7939_st1 | | | | | | | | |
| hsa-asg- | hsa-asg- | 6.97 | 6.76 | 6.86 | 0.15 | 100 | 6.16 | 6.12 | 6.47 |
| 4448 | 4448_st1 | | | | | | | | |
| hsa-asg- | hsa-asg- | 6.62 | 7.06 | 6.84 | 0.31 | 100 | 6.41 | 6.12 | 6.50 |
| 1338 | 1338_st2 | | | | | | | | |
| hsa-asg- | hsa-asg- | 8.11 | 8.21 | 8.16 | 0.07 | 100 | 7.33 | 7.29 | 7.45 |
| 11617 | 11617_st2 | | | | | | | | |
| hsa-asg-954 | hsa-asg- | 9.97 | 9.90 | 9.93 | 0.05 | 100 | 9.28 | 9.11 | 9.34 |
| | 954_st1 | | | | | | | | |
| hsa-asg- | hsa-asg- | 6.49 | 6.76 | 6.63 | 0.19 | 100 | 6.04 | 6.16 | 5.64 |
| 2381 | 2381_st2 | | | | | | | | |
| hsa-asg- | hsa-asg- | 5.89 | 6.04 | 5.97 | 0.11 | 50 | 5.87 | 5.02 | 5.40 |
| 2697 | 2697_st1 | | | | | | | | |
| hsa-asg- | hsa-asg- | 6.15 | 6.34 | 6.25 | 0.13 | 50 | 5.60 | 5.52 | 5.84 |
| 2365 | 2365_st1 | | | | | | | | |
| hsa-asg- | hsa-asg- | 5.37 | 5.98 | 5.68 | 0.43 | 50 | 5.00 | 5.02 | 5.09 |
| 9795 | 9795_st2 | | | | | | | | |
| hsa-asg- | hsa-asg- | 5.30 | 5.75 | 5.53 | 0.32 | 50 | 4.48 | 4.88 | 4.67 |
| 12457 | 12457_st2 | | | | | | | | |
| hsa-asg- | hsa-asg- | 6.36 | 6.35 | 6.35 | 0.01 | 100 | 5.52 | 5.83 | 5.94 |
| 2500 | 2500_st1 | | | | | | | | |
| hsa-asg- | hsa-asg- | 6.94 | 7.85 | 7.40 | 0.64 | 100 | 6.68 | 6.97 | 7.02 |
| 8882 | 8882_st1 | | | | | | | | |
| hsa-asg- | hsa-asg- | 6.03 | 5.83 | 5.93 | 0.14 | 100 | 5.36 | 5.10 | 5.11 |
| 5973 | 5973_st1 | | | | | | | | |
| hsa-asg- | hsa-asg- | 6.43 | 6.80 | 6.61 | 0.26 | 100 | 5.93 | 6.59 | 5.98 |
| 6616 | 6616_st1 | | | | | | | | |
| hsa-asg- | hsa-asg- | 6.67 | 6.97 | 6.82 | 0.21 | 100 | 6.42 | 6.33 | 6.32 |
| 13294 | 13294_st2 | | | | | | | | |
| hsa-asg- | hsa-asg- | 5.47 | 5.49 | 5.48 | 0.01 | 100 | 5.00 | 4.93 | 4.35 |
| 9521 | 9521_st2 | | | | | | | | |
| hsa-asg- | hsa-asg- | 8.94 | 9.21 | 9.08 | 0.19 | 100 | 8.48 | 8.25 | 8.53 |
| 7450 | 7450_st1 | | | | | | | | |
| hsa-asg- | hsa-asg- | 4.90 | 5.17 | 5.04 | 0.20 | 50 | 4.53 | 4.33 | 4.42 |
| 4030 | 4030_st2 | | | | | | | | |
| hsa-asg- | hsa-asg- | 7.27 | 7.69 | 7.48 | 0.30 | 100 | 6.64 | 6.89 | 7.15 |
| 12406 | 12406_st1 | | | | | | | | |
| hsa-asg- | hsa-asg- | 6.13 | 6.11 | 6.12 | 0.02 | 50 | 5.67 | 5.90 | 5.76 |
| 12885 | 12885_st1 | | | | | | | | |
| hsa-cand873 | hsa- | 5.86 | 5.93 | 5.90 | 0.05 | 100 | 5.41 | 5.29 | 5.02 |
| | cand873_st1 | | | | | | | | |
| hsa-asg- | hsa-asg- | 13.51 | 14.05 | 13.78 | 0.38 | 100 | 13.37 | 13.40 | 13.27 |
| 14201 | 14201_st2 | | | | | | | | |
| hsa-asg- | hsa-asg- | 10.48 | 11.07 | 10.78 | 0.42 | 100 | 10.50 | 10.37 | 10.00 |
| 8568 | 8568_st1 | | | | | | | | |
| hsa-asg- | hsa-asg- | 7.88 | 8.39 | 8.13 | 0.36 | 100 | 7.57 | 7.54 | 7.68 |
| 3239 | 3239_st2 | | | | | | | | |
| hsa-asg- | hsa-asg- | 7.66 | 7.57 | 7.62 | 0.07 | 100 | 7.19 | 7.01 | 7.12 |
| 4984 | 4984_st1 | | | | | | | | |
| hsa-asg- | hsa-asg- | 6.32 | 6.13 | 6.23 | 0.14 | 100 | 5.98 | 5.64 | 5.80 |
| 2093 | 2093_st1 | | | | | | | | |
| | hsa-asg- | 6.38 | 6.41 | 6.39 | 0.02 | 100 | 5.82 | 6.28 | 6.01 |
| hsa-asg-733 | 733_st1 | | | | | | | | |
| hsa-asg-89 | hsa-asg- | 6.52 | 6.58 | 6.55 | 0.04 | 100 | 6.00 | 6.26 | 6.17 |
| | 89_st2 | | | | | | | | |
| hsa-asg- | hsa-asg- | 6.19 | 6.04 | 6.12 | 0.11 | 100 | 5.78 | 5.56 | 5.89 |
| 12816 | 12816_st1 | | | | | | | | |
| hsa-asg- | hsa-asg- | 5.89 | 5.79 | 5.84 | 0.07 | 0 | 5.27 | 5.70 | 5.61 |
| 11057 | 11057_st1 | | | | | | | | |
| hsa-asg- | hsa-asg- | 6.67 | 6.46 | 6.57 | 0.15 | 100 | 6.11 | 6.30 | 6.17 |
| 6305 | 6305_st1 | | | | | | | | |
| hsa-asg- | hsa-asg- | 5.86 | 6.03 | 5.95 | 0.12 | 50 | 5.95 | 5.59 | 5.49 |
| 4587 | 4587_st1 | | | | | | | | |
| hsa-asg- | hsa-asg- | 6.03 | 6.13 | 6.08 | 0.07 | 50 | 5.85 | 6.02 | 5.92 |
| 2483 | 2483_st2 | | | | | | | | |
| hsa-asg-758 | hsa-asg- | 6.25 | 6.20 | 6.23 | 0.04 | 50 | 6.51 | 6.71 | 6.34 |
| | 758_st1 | | | | | | | | |
| hsa-asg- | hsa-asg- | 6.34 | 6.29 | 6.31 | 0.04 | 100 | 6.38 | 6.59 | 6.82 |
| 7410 | 7410_st1 | | | | | | | | |
| hsa-asg- | hsa-asg- | 9.87 | 10.06 | 9.97 | 0.14 | 100 | 10.37 | 10.21 | 10.17 |
| 2899 | 2899_st2 | | | | | | | | |
| hsa-asg- | hsa-asg- | 9.14 | 8.83 | 8.99 | 0.21 | 50 | 9.10 | 9.21 | 9.44 |
| 7628 | 7628_st2 | | | | | | | | |
| hsa-asg- | hsa-asg- | 10.36 | 10.48 | 10.42 | 0.09 | 100 | 10.76 | 10.52 | 10.96 |
| 14034 | 14034_st1 | | | | | | | | |
| hsa-asg- | hsa-asg- | 9.65 | 9.45 | 9.55 | 0.14 | 100 | 9.69 | 9.77 | 9.89 |
| 8253 | 8253_st2 | | | | | | | | |
| hsa-asg- | hsa-asg- | 4.59 | 4.55 | 4.57 | 0.02 | 0 | 4.76 | 5.18 | 4.72 |
| 4426 | 4426_st2 | | | | | | | | |
| hsa-asg- | hsa-asg- | 6.59 | 6.14 | 6.36 | 0.32 | 50 | 6.52 | 6.73 | 6.78 |
| 8655 | 8655_st1 | | | | | | | | |
| hsa-asg- | hsa-asg- | 10.98 | 11.15 | 11.07 | 0.12 | 100 | 11.43 | 11.30 | 11.51 |
| 10632 | 10632_st1 | | | | | | | | |
| hsa-asg-974 | hsa-asg- | 6.60 | 6.60 | 6.60 | 0.00 | 100 | 6.71 | 7.06 | 7.30 |
| | 974_st2 | | | | | | | | |
| hsa-asg- | hsa-asg- | 6.15 | 6.02 | 6.09 | 0.09 | 0 | 6.32 | 6.46 | 6.60 |
| 7218 | 7218_st1 | | | | | | | | |
| hsa-asg-206 | hsa-asg- | 9.59 | 9.13 | 9.36 | 0.33 | 50 | 9.82 | 9.68 | 9.76 |
| | 206_st2 | | | | | | | | |
| hsa-asg- | hsa-asg- | 7.44 | 7.52 | 7.48 | 0.06 | 0 | 7.64 | 7.74 | 8.17 |
| 3565 | 3565_st2 | | | | | | | | |
| hsa-cand559 | hsa- | 6.88 | 7.08 | 6.98 | 0.14 | 100 | 7.13 | 7.31 | 7.70 |
| | cand559_st1 | | | | | | | | |
| hsa-asg- | hsa-asg- | 8.00 | 7.96 | 7.98 | 0.03 | 100 | 8.67 | 8.09 | 8.48 |
| 1809 | 1809_st1 | | | | | | | | |
| hsa-asg- | hsa-asg- | 8.37 | 8.28 | 8.32 | 0.07 | 100 | 8.63 | 8.61 | 8.74 |
| 4020 | 4020_st2 | | | | | | | | |
| hsa-asg- | hsa-asg- | 7.95 | 7.76 | 7.86 | 0.14 | 100 | 8.02 | 8.21 | 8.42 |
| 10392 | 10392_st1 | | | | | | | | |
| hsa-asg- | hsa-asg- | 6.07 | 6.15 | 6.11 | 0.06 | 0 | 6.32 | 6.60 | 6.49 |
| 9501 | 9501_st1 | | | | | | | | |
| hsa-asg-976 | hsa-asg- | 6.27 | 6.18 | 6.22 | 0.06 | 50 | 6.29 | 6.82 | 6.71 |
| | 976_st2 | | | | | | | | |
| hsa-asg- | hsa-asg- | 9.27 | 9.72 | 9.49 | 0.32 | 100 | 9.97 | 9.92 | 9.87 |
| 5749 | 5749_st2 | | | | | | | | |
| hsa-asg- | hsa-asg- | 8.63 | 9.06 | 8.84 | 0.30 | 100 | 9.43 | 9.12 | 9.14 |
| 8631 | 8631_st1 | | | | | | | | |
| hsa-asg- | hsa-asg- | 8.92 | 8.89 | 8.90 | 0.02 | 50 | 9.32 | 9.13 | 9.24 |
| 7051 | 7051_st1 | | | | | | | | |
| hsa-asg- | hsa-asg- | 5.30 | 5.95 | 5.63 | 0.46 | 50 | 6.16 | 5.78 | 6.06 |
| 10506 | 10506_st2 | | | | | | | | |
| hsa-asg-507 | hsa-asg- | 2.58 | 2.61 | 2.60 | 0.02 | 0 | 3.11 | 2.82 | 2.89 |
| | 507_st1 | | | | | | | | |
| hsa-asg- | hsa-asg- | 7.66 | 7.96 | 7.81 | 0.22 | 100 | 8.11 | 8.16 | 8.00 |
| 6018 | 6018_st2 | | | | | | | | |
| hsa-asg- | hsa-asg- | 9.21 | 9.01 | 9.11 | 0.14 | 50 | 9.41 | 9.43 | 9.71 |
| 3240 | 3240_st1 | | | | | | | | |
| hsa-asg-504 | hsa-asg- | 8.27 | 8.53 | 8.40 | 0.18 | 100 | 8.67 | 8.78 | 8.93 |
| | 504_st2 | | | | | | | | |
| hsa-cand110 | hsa- | 10.26 | 10.37 | 10.31 | 0.08 | 100 | 10.77 | 10.67 | 10.67 |
| | cand110_st2 | | | | | | | | |
| hsa-asg- | hsa-asg- | 11.18 | 10.96 | 11.07 | 0.16 | 100 | 11.45 | 11.50 | 11.40 |
| 3811 | 3811_st1 | | | | | | | | |
| hsa-asg- | hsa-asg- | 10.24 | 10.74 | 10.49 | 0.35 | 100 | 11.03 | 10.89 | 10.72 |
| 6398 | 6398_st2 | | | | | | | | |
| hsa-asg- | hsa-asg- | 9.32 | 9.57 | 9.45 | 0.17 | 100 | 9.71 | 9.86 | 10.00 |
| 4731 | 4731_st1 | | | | | | | | |
| hsa-asg- | hsa-asg- | 9.98 | 10.17 | 10.08 | 0.13 | 100 | 10.70 | 10.28 | 10.39 |
| 7096 | 7096_st2 | | | | | | | | |
| hsa-asg- | hsa-asg- | 8.90 | 8.81 | 8.85 | 0.07 | 100 | 9.11 | 9.35 | 9.13 |
| 6367 | 6367_st1 | | | | | | | | |
| hsa-asg- | hsa-asg- | 9.33 | 8.94 | 9.13 | 0.28 | 50 | 9.32 | 9.64 | 9.52 |
| 3456 | 3456_st2 | | | | | | | | |
| hsa-asg- | hsa-asg- | 6.21 | 6.28 | 6.24 | 0.05 | 100 | 6.31 | 6.80 | 6.71 |
| 1641 | 1641_st1 | | | | | | | | |
| hsa-asg- | hsa-asg- | 9.41 | 9.82 | 9.61 | 0.29 | 100 | 10.16 | 9.86 | 9.98 |
| 2980 | 2980_st2 | | | | | | | | |
| hsa-asg- | hsa-asg- | 8.10 | 8.57 | 8.34 | 0.34 | 100 | 8.96 | 8.78 | 8.70 |
| 4828 | 4828_st1 | | | | | | | | |
| hsa-asg- | hsa-asg- | 8.72 | 8.84 | 8.78 | 0.09 | 100 | 9.13 | 9.19 | 9.42 |
| 9266 | 9266_st1 | | | | | | | | |
| hsa-asg- | hsa-asg- | 10.39 | 10.26 | 10.32 | 0.09 | 100 | 10.63 | 10.81 | 10.78 |
| 3260 | 3260_st2 | | | | | | | | |
| hsa-asg- | hsa-asg- | 7.87 | 7.58 | 7.72 | 0.21 | 100 | 7.91 | 8.32 | 8.19 |
| 6802 | 6802_st1 | | | | | | | | |
| hsa-asg- | hsa-asg- | 5.57 | 5.39 | 5.48 | 0.12 | 0 | 5.76 | 6.18 | 5.84 |
| 7579 | 7579_st2 | | | | | | | | |
| hsa-asg- | hsa-asg- | 3.71 | 3.96 | 3.84 | 0.17 | 0 | 4.08 | 4.63 | 4.42 |
| 12857 | 12857_st1 | | | | | | | | |
| hsa-asg- | hsa-asg- | 7.98 | 8.02 | 8.00 | 0.02 | 100 | 8.17 | 8.41 | 8.26 |
| 8421 | 8421_st1 | | | | | | | | |
| hsa-cand583 | hsa- | 5.62 | 5.21 | 5.42 | 0.29 | 0 | 6.20 | 5.85 | 5.61 |
| | cand583_st1 | | | | | | | | |
| hsa-asg- | hsa-asg- | 8.51 | 8.81 | 8.66 | 0.21 | 100 | 9.32 | 8.93 | 9.13 |
| 1123 | 1123_st1 | | | | | | | | |
| hsa-asg- | hsa-asg- | 9.18 | 8.72 | 8.95 | 0.33 | 100 | 9.30 | 9.46 | 9.43 |
| 11946 | 11946_st1 | | | | | | | | |
| hsa-asg- | hsa-asg- | 6.56 | 6.87 | 6.71 | 0.22 | 100 | 6.96 | 7.36 | 7.26 |
| 12953 | 12953_st2 | | | | | | | | |
| hsa-asg- | hsa-asg- | 8.19 | 7.78 | 7.99 | 0.29 | 100 | 8.23 | 8.32 | 8.52 |
| 10639 | 10639_st1 | | | | | | | | |
| hsa-asg- | hsa-asg- | 7.84 | 7.49 | 7.66 | 0.25 | 100 | 7.93 | 7.85 | 8.20 |
| 3345 | 3345_st1 | | | | | | | | |
| hsa-asg- | hsa-asg- | 7.20 | 7.26 | 7.23 | 0.04 | 100 | 7.65 | 7.81 | 7.75 |
| 3230 | 3230_st1 | | | | | | | | |
| hsa-cand441 | hsa- | 7.25 | 6.85 | 7.05 | 0.28 | 0 | 7.18 | 7.74 | 7.51 |
| | cand441_st2 | | | | | | | | |
| hsa-asg- | hsa-asg- | 10.32 | 9.87 | 10.09 | 0.32 | 100 | 10.62 | 10.36 | 10.48 |
| 3892 | 3892_st2 | | | | | | | | |
| hsa-asg- | hsa-asg- | 6.71 | 6.47 | 6.59 | 0.17 | 100 | 7.01 | 7.18 | 7.12 |
| 7326 | 7326_st1 | | | | | | | | |
| hsa-asg- | hsa-asg- | 6.73 | 7.12 | 6.92 | 0.28 | 100 | 7.31 | 7.29 | 7.58 |
| 1174 | 1174_st2 | | | | | | | | |
| hsa-asg- | hsa-asg- | 6.52 | 6.64 | 6.58 | 0.09 | 0 | 6.90 | 7.24 | 7.57 |
| 3290 | 3290_st1 | | | | | | | | |
| hsa-asg- | hsa-asg- | 7.93 | 7.49 | 7.71 | 0.31 | 50 | 8.12 | 8.40 | 8.21 |
| 12441 | 12441_st1 | | | | | | | | |
| hsa-asg- | hsa-asg- | 7.20 | 7.24 | 7.22 | 0.03 | 100 | 7.68 | 7.82 | 7.40 |
| 4502 | 4502_st1 | | | | | | | | |
| hsa-asg- | hsa-asg- | 8.77 | 8.90 | 8.84 | 0.09 | 50 | 9.38 | 9.41 | 9.31 |
| 11758 | 11758_st2 | | | | | | | | |
| hsa-asg- | hsa-asg- | 6.73 | 6.44 | 6.58 | 0.21 | 100 | 6.80 | 7.05 | 7.29 |
| 4759 | 4759_st1 | | | | | | | | |
| hsa-asg- | hsa-asg- | 7.10 | 7.09 | 7.09 | 0.01 | 0 | 7.35 | 7.37 | 7.65 |
| 3808 | 3808_st1 | | | | | | | | |
| hsa-asg- | hsa-asg- | 7.58 | 7.73 | 7.66 | 0.10 | 100 | 7.99 | 8.37 | 8.11 |
| 11249 | 11249_st2 | | | | | | | | |
| hsa-asg- | hsa-asg- | 8.98 | 9.37 | 9.18 | 0.28 | 100 | 9.76 | 9.63 | 9.44 |
| 6728 | 6728_st2 | | | | | | | | |
| hsa-asg- | hsa-asg- | 7.56 | 6.89 | 7.23 | 0.47 | 100 | 7.80 | 7.71 | 7.68 |
| 2891 | 2891_st1 | | | | | | | | |
| hsa-asg- | hsa-asg- | 4.70 | 4.16 | 4.43 | 0.38 | 0 | 4.80 | 4.74 | 4.83 |
| 14186 | 14186_st2 | | | | | | | | |
| hsa-cand735 | hsa- | 7.49 | 7.47 | 7.48 | 0.01 | 100 | 7.93 | 8.02 | 7.94 |
| | cand735_st2 | | | | | | | | |
| hsa-asg- | hsa-asg- | 4.90 | 5.09 | 4.99 | 0.14 | 0 | 5.52 | 5.70 | 5.73 |
| 8391 | 8391_st1 | | | | | | | | |
| hsa-asg- | hsa-asg- | 5.86 | 6.10 | 5.98 | 0.17 | 0 | 6.32 | 6.56 | 6.56 |
| 1617 | 1617_st2 | | | | | | | | |
| hsa-asg- | hsa-asg- | 8.13 | 8.10 | 8.11 | 0.02 | 100 | 8.81 | 8.50 | 8.73 |
| 2626 | 2626_st1 | | | | | | | | |
| hsa-asg- | hsa-asg- | 6.60 | 6.12 | 6.36 | 0.34 | 50 | 6.79 | 6.76 | 6.95 |
| 11252 | 11252_st2 | | | | | | | | |
| hsa-asg- | hsa-asg- | 4.75 | 4.49 | 4.62 | 0.18 | 0 | 5.17 | 5.36 | 5.81 |
| 11585 | 11585_st2 | | | | | | | | |
| hsa-asg- | hsa-asg- | 7.14 | 6.89 | 7.01 | 0.18 | 100 | 7.57 | 7.64 | 7.76 |
| 10575 | 10575_st1 | | | | | | | | |
| hsa-asg- | hsa-asg- | 6.81 | 6.80 | 6.81 | 0.00 | 100 | 7.27 | 7.18 | 7.19 |
| 14066 | 14066_st2 | | | | | | | | |
| hsa-asg- | hsa-asg- | 7.98 | 7.87 | 7.92 | 0.08 | 50 | 8.22 | 8.27 | 8.37 |
| 11729 | 11729_st2 | | | | | | | | |
| hsa-asg- | hsa-asg- | 6.97 | 7.43 | 7.20 | 0.33 | 100 | 7.83 | 7.73 | 7.43 |
| 11521 | 11521_st1 | | | | | | | | |
| hsa-asg- | hsa-asg- | 8.03 | 8.64 | 8.33 | 0.43 | 100 | 9.11 | 8.89 | 8.82 |
| 12581 | 12581_st1 | | | | | | | | |
| hsa-asg- | hsa-asg- | 8.82 | 8.72 | 8.77 | 0.07 | 50 | 9.35 | 9.21 | 9.40 |
| 13079 | 13079_st2 | | | | | | | | |
| hsa-asg- | hsa-asg- | 4.41 | 4.96 | 4.68 | 0.39 | 0 | 5.14 | 5.52 | 5.33 |
| 7569 | 7569_st1 | | | | | | | | |
| hsa-asg- | hsa-asg- | 8.56 | 8.09 | 8.32 | 0.34 | 100 | 8.83 | 9.16 | 8.82 |
| 3462 | 3462_st2 | | | | | | | | |
| hsa-asg- | hsa-asg- | 6.75 | 6.01 | 6.38 | 0.53 | 50 | 6.57 | 6.97 | 7.38 |
| 8227 | 8227_st2 | | | | | | | | |
| hsa-asg-508 | hsa-asg- | 5.94 | 5.78 | 5.86 | 0.11 | 50 | 6.23 | 5.99 | 6.52 |
| | 508_st2 | | | | | | | | |
| hsa-asg- | hsa-asg- | 7.51 | 6.80 | 7.16 | 0.50 | 100 | 7.57 | 7.73 | 7.66 |
| 2580 | 2580_st1 | | | | | | | | |
| hsa-asg- | hsa-asg- | 7.13 | 6.82 | 6.98 | 0.22 | 100 | 7.04 | 7.56 | 7.87 |
| 7687 | 7687_st2 | | | | | | | | |
| hsa-asg-688 | hsa-asg- | 6.92 | 7.21 | 7.06 | 0.21 | 100 | 7.55 | 7.65 | 7.68 |
| | 688_st2 | | | | | | | | |
| hsa-asg- | hsa-asg- | 7.43 | 7.34 | 7.39 | 0.06 | 100 | 7.59 | 8.05 | 8.10 |
| 3746 | 3746_st1 | | | | | | | | |
| hsa-asg- | hsa-asg- | 4.59 | 5.21 | 4.90 | 0.44 | 0 | 5.30 | 5.10 | 5.73 |
| 2041 | 2041_st1 | | | | | | | | |
| hsa-asg-819 | hsa-asg- | 7.40 | 6.85 | 7.12 | 0.39 | 100 | 7.52 | 7.25 | 7.91 |
| | 819_st1 | | | | | | | | |
| hsa-asg- | hsa-asg- | 4.27 | 4.49 | 4.38 | 0.15 | 0 | 4.88 | 4.79 | 5.21 |
| 4200 | 4200_st1 | | | | | | | | |
| hsa-asg- | hsa-asg- | 6.78 | 6.32 | 6.55 | 0.32 | 100 | 7.05 | 7.32 | 7.53 |
| 4469 | 4469_st1 | | | | | | | | |
| hsa-asg- | hsa-asg- | 4.53 | 4.49 | 4.51 | 0.03 | 0 | 4.71 | 5.14 | 5.25 |
| 10183 | 10183_st1 | | | | | | | | |
| hsa-cand523 | hsa- | 5.57 | 5.34 | 5.45 | 0.16 | 0 | 5.74 | 6.06 | 6.03 |
| | cand523_st1 | | | | | | | | |
| hsa-asg- | hsa-asg- | 6.17 | 5.36 | 5.77 | 0.58 | 0 | 6.00 | 6.57 | 6.33 |
| 8393 | 8393_st1 | | | | | | | | |
| hsa-asg- | hsa-asg- | 6.03 | 5.98 | 6.00 | 0.04 | 50 | 6.64 | 6.82 | 6.96 |
| 9729 | 9729_st2 | | | | | | | | |
| hsa-asg- | hsa-asg- | 5.68 | 6.19 | 5.94 | 0.36 | 0 | 6.61 | 6.46 | 6.75 |
| 6675 | 6675_st1 | | | | | | | | |
| hsa-asg- | hsa-asg- | 7.48 | 7.40 | 7.44 | 0.06 | 100 | 7.99 | 8.18 | 7.69 |
| 1813 | 1813_st2 | | | | | | | | |
| hsa-asg- | hsa-asg- | 5.79 | 5.63 | 5.71 | 0.11 | 0 | 6.35 | 6.35 | 6.39 |
| 8562 | 8562_st1 | | | | | | | | |
| hsa-asg- | hsa-asg- | 6.74 | 6.82 | 6.78 | 0.05 | 100 | 6.74 | 7.67 | 7.77 |
| 11479 | 11479_st2 | | | | | | | | |
| hsa-asg- | hsa-asg- | 8.60 | 8.51 | 8.55 | 0.06 | 0 | 9.11 | 9.03 | 8.99 |
| 5379 | 5379_st2 | | | | | | | | |
| hsa-asg- | hsa-asg- | 5.60 | 5.52 | 5.56 | 0.05 | 0 | 5.91 | 5.87 | 6.71 |
| 11563 | 11563_st2 | | | | | | | | |
| hsa-asg- | hsa-asg- | 6.64 | 6.39 | 6.52 | 0.18 | 100 | 7.21 | 7.20 | 7.17 |
| 2131 | 2131_st2 | | | | | | | | |
| hsa-asg- | hsa-asg- | 6.39 | 5.66 | 6.03 | 0.52 | 50 | 6.64 | 6.68 | 7.01 |
| 5289 | 5289_st2 | | | | | | | | |
| hsa-asg- | hsa-asg- | 6.05 | 5.83 | 5.94 | 0.15 | 0 | 6.39 | 6.78 | 7.06 |
| 8565 | 8565_st1 | | | | | | | | |
| hsa-asg- | hsa-asg- | 5.07 | 5.05 | 5.06 | 0.01 | 0 | 5.57 | 5.52 | 5.75 |
| 4599 | 4599_st1 | | | | | | | | |
| hsa-asg- | hsa-asg- | 5.41 | 5.43 | 5.42 | 0.01 | 0 | 5.64 | 6.15 | 6.57 |
| 3340 | 3340_st2 | | | | | | | | |
| hsa-asg- | hsa-asg- | 5.41 | 5.97 | 5.69 | 0.39 | 0 | 6.39 | 6.28 | 6.30 |
| 3694 | 3694_st1 | | | | | | | | |
| hsa-asg- | hsa-asg- | 11.92 | 11.41 | 11.66 | 0.36 | 100 | 12.17 | 12.52 | 12.61 |
| 9530 | 9530_st2 | | | | | | | | |
| hsa-asg- | hsa-asg- | 7.46 | 7.04 | 7.25 | 0.29 | 100 | 7.58 | 8.08 | 8.06 |
| 5085 | 5085_st2 | | | | | | | | |
| hsa-asg- | hsa-asg- | 6.29 | 6.00 | 6.14 | 0.20 | 0 | 6.56 | 7.00 | 6.96 |
| 2588 | 2588_st1 | | | | | | | | |
| hsa-asg- | hsa-asg- | 6.48 | 6.15 | 6.31 | 0.23 | 100 | 6.78 | 7.18 | 7.10 |
| 5061 | 5061_st1 | | | | | | | | |
| hsa-asg- | hsa-asg- | 7.43 | 7.40 | 7.42 | 0.02 | 0 | 8.36 | 7.91 | 7.99 |
| 11155 | 11155_st1 | | | | | | | | |
| hsa-asg- | hsa-asg- | 3.52 | 3.05 | 3.28 | 0.33 | 0 | 4.08 | 3.88 | 4.05 |
| 8672 | 8672_st1 | | | | | | | | |
| hsa-asg- | hsa-asg- | 6.56 | 5.99 | 6.27 | 0.40 | 50 | 6.63 | 7.00 | 7.14 |
| 1576 | 1576_st1 | | | | | | | | |
| hsa-asg- | hsa-asg- | 5.81 | 5.36 | 5.59 | 0.32 | 0 | 5.55 | 6.17 | 6.49 |
| 7730 | 7730_st2 | | | | | | | | |
| hsa-asg- | hsa-asg- | 9.32 | 8.80 | 9.06 | 0.37 | 50 | 10.04 | 9.84 | 9.80 |
| 12247 | 12247_st2 | | | | | | | | |
| hsa-asg- | hsa-asg- | 6.49 | 6.55 | 6.52 | 0.04 | 100 | 6.86 | 7.10 | 7.00 |
| 9511 | 9511_st2 | | | | | | | | |
| hsa-asg- | hsa-asg- | 5.19 | 5.39 | 5.29 | 0.14 | 0 | 5.95 | 6.14 | 5.93 |
| 8959 | 8959_st2 | | | | | | | | |
| hsa-asg-797 | hsa-asg- | 4.75 | 4.43 | 4.59 | 0.22 | 0 | 5.33 | 5.36 | 5.13 |
| | 797_st2 | | | | | | | | |
| hsa-asg-271 | hsa-asg- | 3.71 | 3.74 | 3.73 | 0.02 | 0 | 4.20 | 4.51 | 4.28 |
| | 271_st1 | | | | | | | | |
| hsa-asg- | hsa-asg- | 11.20 | 10.32 | 10.76 | 0.62 | 100 | 11.21 | 11.69 | 11.59 |
| 2750 | 2750_st2 | | | | | | | | |
| hsa-asg- | hsa-asg- | 5.84 | 5.31 | 5.57 | 0.38 | 0 | 6.06 | 6.37 | 6.60 |
| 2693 | 2693_st1 | | | | | | | | |
| hsa-asg-53 | hsa-asg- | 9.00 | 9.21 | 9.11 | 0.15 | 100 | 9.81 | 9.77 | 9.80 |
| | 53_st2 | | | | | | | | |
| hsa-asg- | hsa-asg- | 8.23 | 9.03 | 8.63 | 0.56 | 100 | 9.13 | 9.16 | 9.36 |
| 5032 | 5032_st2 | | | | | | | | |
| hsa-asg- | hsa-asg- | 6.79 | 6.22 | 6.51 | 0.41 | 50 | 7.17 | 7.19 | 7.20 |
| 6892 | 6892_st2 | | | | | | | | |
| hsa-asg- | hsa-asg- | 6.11 | 6.38 | 6.25 | 0.19 | 50 | 6.77 | 7.10 | 6.68 |
| 1911 | 1911_st1 | | | | | | | | |
| hsa-asg- | hsa-asg- | 5.54 | 6.44 | 5.99 | 0.64 | 50 | 6.53 | 6.12 | 6.78 |
| 8675 | 8675_st1 | | | | | | | | |
| hsa-asg-809 | hsa-asg- | 5.30 | 5.55 | 5.43 | 0.18 | 0 | 5.62 | 6.26 | 6.23 |
| | 809_st2 | | | | | | | | |
| hsa-asg- | hsa-asg- | 7.56 | 6.67 | 7.12 | 0.63 | 100 | 7.64 | 7.81 | 7.92 |
| 11893 | 11893_st2 | | | | | | | | |
| hsa-asg- | hsa-asg- | 7.69 | 6.65 | 7.17 | 0.74 | 100 | 7.67 | 8.01 | 7.84 |
| 1861 | 1861_st1 | | | | | | | | |
| hsa-asg- | hsa-asg- | 5.37 | 5.46 | 5.42 | 0.06 | 50 | 6.46 | 5.93 | 6.57 |
| 6651 | 6651_st2 | | | | | | | | |
| hsa-asg-471 | hsa-asg- | 7.27 | 7.54 | 7.41 | 0.19 | 0 | 8.03 | 8.17 | 8.19 |
| | 471_st1 | | | | | | | | |
| hsa-asg- | hsa-asg- | 5.27 | 5.03 | 5.15 | 0.17 | 0 | 5.62 | 6.28 | 6.43 |
| 10861 | 10861_st2 | | | | | | | | |
| hsa-asg- | hsa-asg- | 7.88 | 7.63 | 7.75 | 0.18 | 100 | 8.30 | 8.52 | 8.63 |
| 4310 | 4310_st1 | | | | | | | | |
| hsa-asg- | hsa-asg- | 7.18 | 7.33 | 7.25 | 0.10 | 100 | 7.40 | 8.27 | 8.68 |
| 7153 | 7153_st2 | | | | | | | | |
| hsa-asg- | hsa-asg- | 4.64 | 5.21 | 4.93 | 0.40 | 0 | 5.60 | 5.75 | 5.95 |
| 6879 | 6879_st1 | | | | | | | | |
| hsa-asg- | hsa-asg- | 5.07 | 5.38 | 5.22 | 0.22 | 0 | 5.89 | 6.31 | 5.98 |
| 7352 | 7352_st1 | | | | | | | | |
| hsa-asg- | hsa-asg- | 6.60 | 6.65 | 6.63 | 0.04 | 100 | 7.41 | 7.98 | 7.34 |
| 12775 | 12775_st1 | | | | | | | | |
| hsa-asg- | hsa-asg- | 7.30 | 6.85 | 7.08 | 0.32 | 100 | 7.93 | 7.89 | 8.08 |
| 13613 | 13613_st2 | | | | | | | | |
| hsa-asg- | hsa-asg- | 1.61 | 2.23 | 1.92 | 0.43 | 0 | 3.11 | 2.31 | 2.82 |
| 9748 | 9748_st1 | | | | | | | | |
| hsa-asg- | hsa-asg- | 6.36 | 5.77 | 6.06 | 0.42 | 50 | 6.71 | 6.93 | 6.77 |
| 7640 | 7640_st2 | | | | | | | | |
| hsa-asg- | hsa-asg- | 5.94 | 6.20 | 6.07 | 0.19 | 0 | 6.96 | 6.55 | 6.82 |
| 10971 | 10971_st2 | | | | | | | | |
| hsa-asg- | hsa-asg- | 8.17 | 8.80 | 8.49 | 0.44 | 0 | 9.33 | 9.32 | 8.96 |
| 6092 | 6092_st2 | | | | | | | | |
| hsa-asg-813 | hsa-asg- | 4.64 | 4.61 | 4.63 | 0.02 | 0 | 5.30 | 5.46 | 5.81 |
| | 813_st2 | | | | | | | | |
| hsa-asg- | hsa-asg- | 6.78 | 6.74 | 6.76 | 0.03 | 100 | 7.41 | 7.55 | 7.76 |
| 6437 | 6437_st1 | | | | | | | | |
| hsa-asg- | hsa-asg- | 7.38 | 7.47 | 7.43 | 0.06 | 100 | 8.25 | 8.49 | 8.30 |
| 12946 | 12946_st1 | | | | | | | | |
| hsa-asg- | hsa-asg- | 7.69 | 7.66 | 7.67 | 0.02 | 100 | 8.50 | 8.40 | 8.33 |
| 6948 | 6948_st2 | | | | | | | | |
| hsa-asg- | hsa-asg- | 7.08 | 6.56 | 6.82 | 0.37 | 0 | 7.72 | 7.21 | 7.84 |
| 11486 | 11486_st1 | | | | | | | | |
| hsa-cand711 | hsa- | 9.10 | 9.13 | 9.11 | 0.02 | 50 | 9.89 | 9.84 | 9.99 |
| | cand711_st1 | | | | | | | | |
| hsa-cand588 | hsa- | 5.91 | 5.66 | 5.79 | 0.18 | 0 | 6.93 | 6.16 | 6.88 |
| | cand588_st1 | | | | | | | | |
| hsa-asg-555 | hsa-asg- | 6.78 | 5.89 | 6.34 | 0.63 | 50 | 6.58 | 7.15 | 7.10 |
| | 555_st1 | | | | | | | | |
| hsa-asg- | hsa-asg- | 6.94 | 6.90 | 6.92 | 0.02 | 0 | 7.80 | 7.41 | 7.52 |
| 6149 | 6149_st2 | | | | | | | | |
| hsa-asg- | hsa-asg- | 7.29 | 6.47 | 6.88 | 0.58 | 0 | 7.41 | 7.78 | 7.54 |
| 9920 | 9920_st1 | | | | | | | | |
| hsa-asg- | hsa-asg- | 6.71 | 5.85 | 6.28 | 0.61 | 50 | 7.14 | 7.04 | 7.25 |
| 1391 | 1391_st1 | | | | | | | | |
| hsa-asg- | hsa-asg- | 5.98 | 6.38 | 6.18 | 0.28 | 50 | 7.03 | 6.43 | 6.89 |
| 3150 | 3150_st1 | | | | | | | | |
| hsa-asg- | hsa-asg- | 6.41 | 5.83 | 6.12 | 0.41 | 50 | 6.79 | 6.89 | 7.57 |
| 13829 | 13829_st2 | | | | | | | | |
| hsa-asg- | hsa-asg- | 6.09 | 5.71 | 5.90 | 0.27 | 0 | 5.98 | 6.73 | 6.64 |
| 9382 | 9382_st2 | | | | | | | | |
| hsa-cand855 | hsa- | 5.68 | 6.13 | 5.91 | 0.32 | 0 | 6.18 | 6.83 | 6.90 |
| | cand855_st1 | | | | | | | | |
| hsa-asg- | hsa-asg- | 7.05 | 7.15 | 7.10 | 0.07 | 100 | 7.91 | 7.99 | 7.96 |
| 10716 | 10716_st1 | | | | | | | | |
| hsa-asg- | hsa-asg- | 7.96 | 7.83 | 7.90 | 0.10 | 100 | 8.49 | 9.03 | 8.80 |
| 11698 | 11698_st2 | | | | | | | | |
| hsa-cand902 | hsa- | 5.27 | 5.11 | 5.19 | 0.11 | 0 | 5.55 | 6.08 | 6.34 |
| | cand902_st1 | | | | | | | | |
| hsa-asg- | hsa-asg- | 8.37 | 8.10 | 8.24 | 0.19 | 100 | 9.23 | 9.50 | 9.14 |
| 12919 | 12919_st2 | | | | | | | | |
| hsa-asg- | hsa-asg- | 4.41 | 4.43 | 4.42 | 0.02 | 0 | 5.38 | 5.22 | 4.98 |
| 4261 | 4261_st1 | | | | | | | | |
| hsa-asg- | hsa-asg- | 6.19 | 6.41 | 6.30 | 0.15 | 50 | 7.28 | 7.20 | 7.20 |
| 1153 | 1153_st1 | | | | | | | | |
| hsa-asg- | hsa-asg- | 6.00 | 5.01 | 5.51 | 0.70 | 0 | 6.37 | 6.18 | 6.72 |
| 3841 | 3841_st2 | | | | | | | | |
| hsa-asg- | hsa-asg- | 10.83 | 10.20 | 10.52 | 0.45 | 100 | 10.96 | 11.77 | 11.58 |
| 3231 | 3231_st2 | | | | | | | | |
| hsa-asg-225 | hsa-asg- | 4.85 | 4.26 | 4.56 | 0.41 | 0 | 5.27 | 5.14 | 5.09 |
| | 225_st1 | | | | | | | | |
| hsa-asg- | hsa-asg- | 7.26 | 6.73 | 6.99 | 0.37 | 100 | 7.74 | 7.52 | 7.95 |
| 2017 | 2017_st2 | | | | | | | | |
| hsa-asg- | hsa-asg- | 6.48 | 6.32 | 6.40 | 0.11 | 100 | 7.20 | 6.99 | 7.15 |
| 6623 | 6623_st2 | | | | | | | | |
| hsa-asg- | hsa-asg- | 4.94 | 4.87 | 4.91 | 0.05 | 0 | 5.69 | 5.85 | 5.52 |
| 9526 | 9526_st2 | | | | | | | | |
| hsa-asg- | hsa-asg- | 4.99 | 4.92 | 4.95 | 0.05 | 0 | 5.41 | 6.03 | 6.50 |
| 3014 | 3014_st2 | | | | | | | | |
| hsa-asg- | hsa-asg- | 6.97 | 7.01 | 6.99 | 0.03 | 100 | 7.21 | 8.21 | 8.48 |
| 12957 | 12957_st1 | | | | | | | | |
| hsa-asg- | hsa-asg- | 4.05 | 3.55 | 3.80 | 0.36 | 0 | 4.67 | 5.06 | 5.11 |
| 2564 | 2564_st2 | | | | | | | | |
| hsa-asg- | hsa-asg- | 4.34 | 5.23 | 4.79 | 0.63 | 0 | 5.80 | 5.88 | 5.70 |
| 10473 | 10473_st1 | | | | | | | | |
| hsa-asg- | hsa-asg- | 2.58 | 2.99 | 2.79 | 0.29 | 0 | 3.30 | 3.79 | 3.08 |
| 8303 | 8303_st2 | | | | | | | | |
| hsa-asg- | hsa-asg- | 5.03 | 5.55 | 5.29 | 0.37 | 50 | 6.06 | 6.48 | 6.91 |
| 11310 | 11310_st2 | | | | | | | | |
| hsa-asg- | hsa-asg- | 5.91 | 5.79 | 5.85 | 0.08 | 0 | 6.63 | 7.49 | 6.51 |
| 6831 | 6831_st2 | | | | | | | | |
| hsa-asg- | hsa-asg- | 7.15 | 6.72 | 6.94 | 0.30 | 0 | 7.19 | 8.37 | 8.50 |
| 11373 | 11373_st1 | | | | | | | | |
| hsa-asg- | hsa-asg- | 6.00 | 6.18 | 6.09 | 0.12 | 0 | 6.80 | 6.90 | 7.49 |
| 6005 | 6005_st1 | | | | | | | | |
| hsa-asg- | hsa-asg- | 8.41 | 9.02 | 8.72 | 0.43 | 0 | 9.52 | 9.57 | 9.59 |
| 4654 | 4654_st1 | | | | | | | | |
| hsa-asg- | hsa-asg- | 7.73 | 7.35 | 7.54 | 0.27 | 100 | 7.94 | 8.32 | 9.26 |
| 9403 | 9403_st2 | | | | | | | | |
| hsa-asg- | hsa-asg- | 7.75 | 7.64 | 7.70 | 0.07 | 100 | 8.93 | 8.38 | 8.31 |
| 7893 | 7893_st2 | | | | | | | | |
| hsa-asg- | hsa-asg- | 7.48 | 6.81 | 7.15 | 0.48 | 100 | 7.51 | 8.29 | 8.62 |
| 13000 | 13000_st1 | | | | | | | | |
| hsa-asg- | hsa-asg- | 6.00 | 5.86 | 5.93 | 0.10 | 50 | 6.32 | 7.51 | 7.23 |
| 10883 | 10883_st1 | | | | | | | | |
| hsa-asg- | hsa-asg- | 4.75 | 5.38 | 5.06 | 0.44 | 0 | 5.89 | 5.83 | 5.93 |
| 1689 | 1689_st2 | | | | | | | | |
| hsa-asg- | hsa-asg- | 6.57 | 5.59 | 6.08 | 0.70 | 50 | 6.49 | 7.32 | 7.52 |
| 9412 | 9412_st2 | | | | | | | | |
| hsa-asg- | hsa-asg- | 7.97 | 7.34 | 7.66 | 0.45 | 100 | 8.57 | 8.51 | 8.53 |
| 3271 | 3271_st1 | | | | | | | | |
| hsa-asg- | hsa-asg- | 6.71 | 5.95 | 6.33 | 0.54 | 50 | 7.40 | 7.21 | 7.75 |
| 13559 | 13559_st2 | | | | | | | | |
| hsa-asg- | hsa-asg- | 3.80 | 3.65 | 3.73 | 0.11 | 0 | 4.26 | 4.51 | 4.58 |
| 11898 | 11898_st2 | | | | | | | | |
| hsa-asg- | hsa-asg- | 3.31 | 3.55 | 3.43 | 0.17 | 0 | 4.08 | 4.39 | 4.32 |
| 3081 | 3081_st1 | | | | | | | | |
| hsa-asg- | hsa-asg- | 6.19 | 5.25 | 5.72 | 0.67 | 0 | 6.66 | 6.68 | 6.90 |
| 2858 | 2858_st1 | | | | | | | | |
| hsa-asg-278 | hsa-asg- | 4.64 | 5.31 | 4.97 | 0.47 | 0 | 5.07 | 6.30 | 5.91 |
| | 278_st1 | | | | | | | | |
| hsa-asg- | hsa-asg- | 7.67 | 7.92 | 7.80 | 0.18 | 100 | 8.63 | 8.64 | 8.76 |
| 5423 | 5423_st2 | | | | | | | | |
| hsa-asg- | hsa-asg- | 4.27 | 4.67 | 4.47 | 0.28 | 0 | 5.27 | 5.56 | 5.85 |
| 9257 | 9257_st2 | | | | | | | | |
| hsa-asg- | hsa-asg- | 6.15 | 5.71 | 5.93 | 0.31 | 50 | 6.44 | 7.32 | 7.10 |
| 10197 | 10197_st2 | | | | | | | | |
| hsa-asg- | hsa-asg- | 7.16 | 6.81 | 6.98 | 0.25 | 100 | 8.52 | 8.24 | 8.04 |
| 6507 | 6507_st2 | | | | | | | | |
| hsa-asg- | hsa-asg- | 5.84 | 5.11 | 5.48 | 0.51 | 0 | 6.52 | 6.59 | 6.91 |
| 9015 | 9015_st1 | | | | | | | | |
| hsa-asg- | hsa-asg- | 1.72 | 1.98 | 1.85 | 0.18 | 0 | 3.11 | 2.69 | 3.38 |
| 5460 | 5460_st2 | | | | | | | | |
| hsa-asg- | hsa-asg- | 8.95 | 9.11 | 9.03 | 0.12 | 100 | 10.96 | 10.10 | 9.65 |
| 13308 | 13308_st2 | | | | | | | | |
| hsa-asg- | hsa-asg- | 4.27 | 4.99 | 4.63 | 0.50 | 0 | 5.93 | 5.59 | 5.83 |
| 4440 | 4440_st1 | | | | | | | | |
| hsa-asg- | hsa-asg- | 6.41 | 5.52 | 5.97 | 0.63 | 100 | 7.01 | 7.15 | 7.05 |
| 1375 | 1375_st1 | | | | | | | | |
| hsa-asg- | hsa-asg- | 6.17 | 4.96 | 5.57 | 0.85 | 0 | 6.64 | 6.43 | 6.99 |
| 8763 | 8763_st2 | | | | | | | | |
| hsa-asg- | hsa-asg- | 8.47 | 8.68 | 8.58 | 0.15 | 100 | 9.33 | 9.90 | 10.51 |
| 2872 | 2872_st2 | | | | | | | | |
| hsa-asg- | hsa-asg- | 6.63 | 6.63 | 6.63 | 0.00 | 100 | 7.45 | 8.42 | 8.20 |
| 12460 | 12460_st2 | | | | | | | | |
| hsa-asg- | hsa-asg- | 5.03 | 5.43 | 5.23 | 0.28 | 0 | 6.18 | 5.74 | 6.72 |
| 8138 | 8138_st2 | | | | | | | | |
| hsa-asg- | hsa-asg- | 9.09 | 9.11 | 9.10 | 0.01 | 100 | 11.02 | 10.13 | 9.94 |
| 5304 | 5304_st1 | | | | | | | | |
| hsa-asg- | hsa-asg- | 5.89 | 4.49 | 5.19 | 0.99 | 0 | 6.20 | 6.03 | 6.45 |
| 4971 | 4971_st1 | | | | | | | | |
| hsa-asg- | hsa-asg- | 5.91 | 6.38 | 6.15 | 0.33 | 50 | 7.20 | 7.06 | 7.39 |
| 9343 | 9343_st1 | | | | | | | | |
| hsa-asg- | hsa-asg- | 5.07 | 5.17 | 5.12 | 0.07 | 0 | 6.02 | 6.24 | 6.38 |
| 8271 | 8271_st2 | | | | | | | | |
| hsa-asg- | hsa-asg- | 7.43 | 6.67 | 7.05 | 0.54 | 100 | 8.64 | 8.29 | 8.56 |
| 13260 | 13260_st1 | | | | | | | | |
| hsa-asg- | hsa-asg- | 4.34 | 4.23 | 4.29 | 0.08 | 0 | 5.41 | 5.90 | 4.55 |
| 12105 | 12105_st2 | | | | | | | | |
| hsa-asg- | hsa-asg- | 3.20 | 2.42 | 2.81 | 0.55 | 0 | 3.56 | 4.97 | 3.88 |
| 7685 | 7685_st2 | | | | | | | | |
| hsa-asg- | hsa-asg- | 5.79 | 5.55 | 5.67 | 0.17 | 0 | 7.37 | 6.62 | 6.68 |
| 3360 | 3360_st2 | | | | | | | | |
| hsa-asg- | hsa-asg- | 5.37 | 4.19 | 4.78 | 0.83 | 0 | 5.36 | 6.42 | 6.50 |
| 5576 | 5576_st1 | | | | | | | | |
| hsa-asg- | hsa-asg- | 5.27 | 4.04 | 4.66 | 0.87 | 0 | 5.49 | 6.28 | 5.85 |
| 4843 | 4843_st2 | | | | | | | | |
| hsa-asg- | hsa-asg- | 5.27 | 4.49 | 4.88 | 0.55 | 0 | 5.71 | 6.22 | 7.15 |
| 7009 | 7009_st1 | | | | | | | | |
| hsa-asg- | hsa-asg- | 3.08 | 4.40 | 3.74 | 0.93 | 0 | 4.76 | 5.14 | 5.47 |
| 8928 | 8928_st2 | | | | | | | | |
| hsa-asg- | hsa-asg- | 3.97 | 4.72 | 4.35 | 0.53 | 0 | 5.07 | 5.49 | 5.58 |
| 12777 | 12777_st2 | | | | | | | | |
| hsa-asg- | hsa-asg- | 5.23 | 4.61 | 4.92 | 0.44 | 0 | 5.71 | 6.55 | 7.09 |
| 7069 | 7069_st1 | | | | | | | | |
| hsa-cand965 | hsa- | 6.64 | 5.19 | 5.92 | 1.02 | 0 | 7.25 | 7.94 | 7.66 |
| | cand965_st1 | | | | | | | | |
| hsa-asg- | hsa-asg- | 5.27 | 4.08 | 4.67 | 0.84 | 0 | 5.80 | 6.12 | 6.29 |
| 13693 | 13693_st2 | | | | | | | | |
| hsa-asg- | hsa-asg- | 5.03 | 4.26 | 4.65 | 0.54 | 0 | 6.06 | 6.18 | 6.03 |
| 8329 | 8329_st1 | | | | | | | | |
| hsa-asg- | hsa-asg- | 5.65 | 4.96 | 5.31 | 0.49 | 0 | 5.89 | 6.67 | 6.69 |
| 3597 | 3597_st2 | | | | | | | | |
| hsa-asg- | hsa-asg- | 5.30 | 3.92 | 4.61 | 0.98 | 0 | 5.55 | 6.43 | 6.33 |
| 9852 | 9852_st1 | | | | | | | | |
| hsa-asg- | hsa-asg- | 3.31 | 2.61 | 2.96 | 0.49 | 0 | 4.53 | 4.39 | 3.97 |
| 3107 | 3107_st1 | | | | | | | | |
| hsa-asg- | hsa-asg- | 10.81 | 10.39 | 10.60 | 0.30 | 100 | 12.93 | 11.30 | 12.11 |
| 14245 | 14245_st1 | | | | | | | | |
| hsa-asg- | hsa-asg- | 5.07 | 4.08 | 4.58 | 0.70 | 0 | 5.85 | 6.08 | 6.31 |
| 6949 | 6949_st1 | | | | | | | | |
| hsa-asg- | hsa-asg- | 4.41 | 3.65 | 4.03 | 0.54 | 0 | 5.64 | 5.29 | 5.49 |
| 7319 | 7319_st2 | | | | | | | | |
| hsa-asg- | hsa-asg- | 5.34 | 4.23 | 4.78 | 0.78 | 0 | 6.75 | 5.82 | 6.66 |
| 9022 | 9022_st2 | | | | | | | | |
| hsa-asg- | hsa-asg- | 4.80 | 4.89 | 4.85 | 0.07 | 0 | 6.58 | 5.93 | 6.39 |
| 12246 | 12246_st2 | | | | | | | | |
| hsa-asg- | hsa-asg- | 5.84 | 5.91 | 5.87 | 0.05 | 0 | 6.44 | 8.01 | 8.09 |
| 8917 | 8917_st2 | | | | | | | | |
| hsa-asg- | hsa-asg- | 4.94 | 5.55 | 5.25 | 0.43 | 0 | 7.74 | 7.02 | 7.09 |
| 13244 | 13244_st1 | | | | | | | | |
| hsa-cand345 | hsa- | 4.75 | 4.23 | 4.49 | 0.37 | 0 | 6.31 | 5.64 | 5.72 |
| | cand345_st1 | | | | | | | | |
| hsa-asg- | hsa-asg- | 4.99 | 6.40 | 5.69 | 1.00 | 50 | 7.42 | 7.02 | 8.57 |
| 12702 | 12702_st1 | | | | | | | | |
| hsa-asg- | hsa-asg- | 5.68 | 4.67 | 5.17 | 0.72 | 0 | 7.14 | 7.01 | 6.73 |
| 13230 | 13230_st2 | | | | | | | | |
| hsa-asg- | hsa-asg- | 4.59 | 5.70 | 5.14 | 0.79 | 50 | 7.71 | 7.34 | 6.61 |
| 12902 | 12902_st1 | | | | | | | | |
| hsa-asg- | hsa-asg- | 6.00 | 4.92 | 5.46 | 0.77 | 0 | 7.44 | 6.96 | 7.26 |
| 13237 | 13237_st1 | | | | | | | | |
| hsa-asg- | hsa-asg- | 5.54 | 5.21 | 5.37 | 0.23 | 0 | 5.85 | 7.63 | 7.94 |
| 4002 | 4002_st1 | | | | | | | | |
| hsa-asg-21 | hsa-asg- | 5.11 | 3.45 | 4.28 | 1.18 | 0 | 5.67 | 5.83 | 6.89 |
| | 21_st2 | | | | | | | | |
| hsa-asg- | hsa-asg- | 6.21 | 5.46 | 5.84 | 0.53 | 0 | 7.38 | 7.72 | 8.38 |
| 10149 | 10149_st1 | | | | | | | | |
| hsa-asg- | hsa-asg- | 6.39 | 3.88 | 5.14 | 1.78 | 50 | 6.51 | 7.95 | 6.78 |
| 5303 | 5303_st1 | | | | | | | | |
| hsa-asg- | hsa-asg- | 5.47 | 3.34 | 4.41 | 1.51 | 0 | 6.16 | 6.85 | 7.05 |
| 10666 | 10666_st1 | | | | | | | | |
| hsa-asg-335 | hsa-asg- | 5.86 | 6.02 | 5.94 | 0.11 | 50 | 6.63 | 8.54 | 8.65 |
| | 335_st1 | | | | | | | | |
| hsa-asg- | hsa-asg- | 3.97 | 4.49 | 4.23 | 0.37 | 0 | 5.38 | 6.36 | 6.71 |
| 6250 | 6250_st2 | | | | | | | | |
| hsa-asg- | hsa-asg- | 4.27 | 3.92 | 4.10 | 0.25 | 0 | 5.44 | 6.38 | 6.78 |
| 8208 | 8208_st1 | | | | | | | | |
| hsa-asg- | hsa-asg- | 5.65 | 5.83 | 5.74 | 0.13 | 50 | 6.32 | 8.35 | 8.75 |
| 10387 | 10387_st1 | | | | | | | | |
| hsa-asg- | hsa-asg- | 7.17 | 7.07 | 7.12 | 0.07 | 100 | 9.94 | 8.87 | 8.61 |
| 13248 | 13248_st1 | | | | | | | | |
| hsa-asg- | hsa-asg- | 4.34 | 2.74 | 3.54 | 1.13 | 0 | 4.48 | 6.12 | 6.27 |
| 12079 | 12079_st1 | | | | | | | | |
| hsa-asg- | hsa-asg- | 5.91 | 4.96 | 5.44 | 0.67 | 50 | 7.15 | 7.23 | 7.47 |
| 4557 | 4557_st2 | | | | | | | | |
| hsa-asg- | hsa-asg- | 8.00 | 5.49 | 6.75 | 1.78 | 50 | 8.27 | 9.59 | 9.28 |
| 13937 | 13937_st1 | | | | | | | | |
| hsa-miR165 | hsa- | 4.20 | 2.55 | 3.38 | 1.17 | 0 | 4.80 | 5.14 | 5.47 |
| | miR165_st1 | | | | | | | | |
| hsa-asg- | hsa-asg- | 4.80 | 4.00 | 4.40 | 0.56 | 0 | 4.92 | 7.43 | 7.55 |
| 8682 | 8682_st2 | | | | | | | | |
| hsa-asg- | hsa-asg- | 4.20 | 2.68 | 3.44 | 1.08 | 0 | 5.07 | 5.95 | 6.52 |
| 6413 | 6413_st2 | | | | | | | | |
| hsa-asg- | hsa-asg- | 5.07 | 3.55 | 4.31 | 1.08 | 0 | 6.15 | 6.40 | 7.12 |
| 13304 | 13304_st2 | | | | | | | | |
| hsa-asg- | hsa-asg- | 2.84 | 4.43 | 3.63 | 1.13 | 0 | 4.37 | 6.59 | 6.40 |
| 4205 | 4205_st2 | | | | | | | | |
| hsa-asg-870 | hsa-asg- | 3.97 | 3.39 | 3.68 | 0.41 | 0 | 4.37 | 6.85 | 7.49 |
| | 870_st1 | | | | | | | | |
| hsa-asg- | hsa-asg- | 8.77 | 6.85 | 7.81 | 1.35 | 50 | 9.87 | 10.31 | 10.51 |
| 7074 | 7074_st1 | | | | | | | | |
| hsa-asg- | hsa-asg- | 6.43 | 3.45 | 4.94 | 2.11 | 50 | 8.09 | 7.42 | 7.28 |
| 13279 | 13279_st1 | | | | | | | | |
| hsa-miR- | hsa-asg- | 10.04 | 9.23 | 9.64 | 0.57 | 100 | 11.33 | 11.04 | 10.73 |
| 29b | 14229_st2 | | | | | | | | |
| hsa-miR-9 | hsa- | 4.41 | 7.16 | 5.79 | 1.95 | 50 | 3.01 | 2.94 | 3.88 |
| | cand90_st2 | | | | | | | | |
| hsa-miR- | hsa-asg- | 8.45 | 8.63 | 8.54 | 0.12 | 100 | 7.10 | 6.48 | 6.07 |
| 421 | 5033_st2 | | | | | | | | |

| | | | | | | | | MEL vs LNneg | | |
|---|---|---|---|---|---|---|---|---|---|---|
| Micro | LNneg | | | | | | | | Log2 | |
| RNA | 4 | 5 | 6 | 7 | Mean | SD | % | ttest | Diff | FC |
| hsa-miR- | 4.15 | 3.26 | 5.06 | 4.23 | 4.30 | 0.67 | 0 | 5.46E−06 | 8.04 | 262.3 |
| 205 | | | | | | | | | | |
| hsa-miR- | 5.94 | 5.88 | 6.58 | 6.38 | 5.84 | 0.71 | 29 | 6.15E−06 | 7.28 | 155.8 |
| 203 | | | | | | | | | | |
| hsa-miR- | 4.64 | 5.22 | 4.00 | 3.05 | 4.07 | 1.18 | 0 | 1.75E−04 | 6.38 | 83.3 |
| 211 | | | | | | | | | | |
| hsa-miR- | 5.45 | 7.04 | 6.25 | 6.22 | 6.44 | 0.84 | 86 | 6.84E−05 | 5.95 | 61.8 |
| 509 | | | | | | | | | | |
| hsa-miR- | 5.21 | 5.40 | 5.47 | 5.75 | 5.35 | 1.22 | 14 | 6.16E−04 | 5.93 | 60.8 |
| 513 | | | | | | | | | | |
| hsa-miR- | 8.69 | 6.85 | 7.87 | 7.98 | 7.80 | 0.79 | 100 | 1.26E−03 | 3.83 | 14.3 |
| 200c | | | | | | | | | | |
| hsa-miR- | 7.38 | 5.36 | 4.76 | 5.89 | 5.56 | 1.13 | 0 | 3.55E−03 | 3.63 | 12.4 |
| 132 | | | | | | | | | | |
| hsa-miR- | 6.01 | 6.77 | 6.66 | 6.08 | 6.48 | 0.41 | 100 | 4.74E−04 | 3.58 | 12.0 |
| 506 | | | | | | | | | | |
| hsa-miR- | 6.49 | 6.65 | 6.49 | 6.15 | 6.61 | 0.47 | 100 | 1.78E−04 | 3.48 | 11.2 |
| 508 | | | | | | | | | | |
| hsa-miR- | 6.94 | 6.34 | 6.12 | 6.04 | 6.31 | 0.51 | 86 | 7.09E−04 | 3.27 | 9.7 |
| 183 | | | | | | | | | | |
| hsa-miR- | 7.11 | 6.78 | 7.40 | 8.10 | 6.95 | 0.67 | 100 | 3.27E−03 | 3.13 | 8.8 |
| 200b | | | | | | | | | | |
| hsa-miR- | 4.88 | 5.04 | 4.33 | 4.66 | 5.03 | 0.60 | 14 | 2.46E−03 | 3.12 | 8.7 |
| 510 | | | | | | | | | | |
| hsa-miR- | 2.52 | 3.03 | 2.75 | 2.72 | 2.81 | 0.40 | 0 | 2.96E−03 | 3.09 | 8.5 |
| 561 | | | | | | | | | | |
| hsa-miR- | 4.75 | 3.77 | 5.49 | 5.40 | 4.29 | 0.91 | 29 | 2.63E−03 | 3.09 | 8.5 |
| 493-5p | | | | | | | | | | |
| hsa-miR- | 2.91 | 3.03 | 2.98 | 3.05 | 2.99 | 0.07 | 0 | 6.98E−06 | 3.04 | 8.2 |
| 514 | | | | | | | | | | |
| hsa-miR- | 5.12 | 5.71 | 5.61 | 6.12 | 5.47 | 0.42 | 14 | 3.38E−05 | 2.98 | 7.9 |
| 584 | | | | | | | | | | |
| hsa-miR-9 | 5.25 | 3.86 | 4.00 | 4.78 | 4.18 | 0.62 | 14 | 4.02E−03 | 2.77 | 6.8 |
| hsa-miR- | 3.18 | 2.91 | 2.28 | 3.20 | 2.87 | 0.39 | 0 | 3.56E−03 | 2.60 | 6.1 |
| 576 | | | | | | | | | | |
| hsa-miR-9* | 7.58 | 5.14 | 5.78 | 6.50 | 5.89 | 0.88 | 43 | 2.76E−02 | 2.48 | 5.6 |
| hsa-miR-96 | 4.18 | 3.86 | 3.76 | 4.18 | 3.87 | 0.61 | 0 | 2.76E−03 | 2.38 | 5.2 |
| hsa-miR- | 9.24 | 8.03 | 8.90 | 8.80 | 8.62 | 0.49 | 100 | 2.90E−03 | 2.30 | 4.9 |
| 182 | | | | | | | | | | |
| hsa-miR- | 3.05 | 2.34 | 3.40 | 3.31 | 3.08 | 0.38 | 0 | 1.41E−03 | 1.93 | 3.8 |
| 605 | | | | | | | | | | |
| hsa-miR- | 8.46 | 7.14 | 7.29 | 8.29 | 7.45 | 0.76 | 100 | 1.76E−02 | 1.74 | 3.3 |
| 421 | | | | | | | | | | |
| hsa-miR- | 4.51 | 5.16 | 5.06 | 4.86 | 4.42 | 0.86 | 0 | 4.10E−02 | 1.64 | 3.1 |
| 432 | | | | | | | | | | |
| hsa-miR- | 3.00 | 2.66 | 2.86 | 3.62 | 2.98 | 0.33 | 0 | 3.85E−02 | 1.57 | 3.0 |
| 429 | | | | | | | | | | |
| hsa-miR- | 3.35 | 3.26 | 2.86 | 3.42 | 3.08 | 0.30 | 0 | 2.84E−04 | 1.49 | 2.8 |
| 592 | | | | | | | | | | |
| hsa-miR- | 5.04 | 4.92 | 5.44 | 5.38 | 4.88 | 0.47 | 29 | 1.71E−02 | 1.29 | 2.5 |
| 495 | | | | | | | | | | |
| hsa-miR- | 4.42 | 3.94 | 3.49 | 4.15 | 3.68 | 0.62 | 0 | 3.21E−02 | 1.27 | 2.4 |
| 187 | | | | | | | | | | |
| hsa-miR- | 7.03 | 6.42 | 6.79 | 7.17 | 6.52 | 0.48 | 57 | 1.01E−02 | 1.26 | 2.4 |
| 382 | | | | | | | | | | |
| hsa-miR- | 7.89 | 7.98 | 8.36 | 8.64 | 8.10 | 0.31 | 100 | 5.13E−03 | 1.21 | 2.3 |
| 34a | | | | | | | | | | |
| hsa-miR- | 4.39 | 4.88 | 5.02 | 5.05 | 4.66 | 0.37 | 0 | 1.05E−02 | 1.11 | 2.2 |
| 376a | | | | | | | | | | |
| hsa-miR- | 7.68 | 8.30 | 8.26 | 8.19 | 8.01 | 0.38 | 71 | 6.72E−03 | 1.09 | 2.1 |
| 193b | | | | | | | | | | |
| hsa-miR- | 9.83 | 9.79 | 9.82 | 11.16 | 10.27 | 0.51 | 100 | 3.45E−02 | 1.02 | 2.0 |
| 222 | | | | | | | | | | |
| hsa-miR- | 4.79 | 5.40 | 4.61 | 5.00 | 4.87 | 0.31 | 0 | 4.39E−03 | 0.99 | 2.0 |
| 365 | | | | | | | | | | |
| hsa-miR- | 5.51 | 6.04 | 6.23 | 6.24 | 6.21 | 0.41 | 100 | 2.94E−02 | 0.96 | 1.9 |
| 494 | | | | | | | | | | |
| hsa-miR- | 11.39 | 11.23 | 11.48 | 11.78 | 11.37 | 0.29 | 100 | 2.07E−02 | 0.66 | 1.6 |
| 27a | | | | | | | | | | |
| hsa-miR- | 6.24 | 6.90 | 6.33 | 6.60 | 6.35 | 0.32 | 86 | 3.09E−02 | 0.65 | 1.6 |
| 379 | | | | | | | | | | |
| hsa-miR- | 12.20 | 12.27 | 12.17 | 12.32 | 12.15 | 0.12 | 100 | 1.14E−02 | 0.62 | 1.5 |
| 27b | | | | | | | | | | |
| hsa-miR-21 | 13.29 | 13.27 | 13.26 | 13.27 | 13.30 | 0.17 | 100 | 7.85E−03 | 0.48 | 1.4 |
| hsa-miR-24 | 13.12 | 13.42 | 13.39 | 13.35 | 13.21 | 0.25 | 100 | 3.90E−02 | 0.47 | 1.4 |
| hsa-miR- | 13.46 | 13.32 | 13.05 | 13.12 | 13.24 | 0.15 | 100 | 5.58E−03 | 0.44 | 1.4 |
| 23b | | | | | | | | | | |
| hsa-miR- | 12.42 | 12.40 | 12.48 | 12.91 | 12.61 | 0.20 | 100 | 3.53E−02 | 0.44 | 1.4 |
| 221 | | | | | | | | | | |
| hsa-let-7e | 12.26 | 12.38 | 12.02 | 12.29 | 12.20 | 0.14 | 100 | 1.19E−02 | 0.42 | 1.3 |
| hsa-miR- | 11.57 | 11.39 | 11.43 | 11.69 | 11.55 | 0.15 | 100 | 9.67E−03 | 0.41 | 1.3 |
| 30b | | | | | | | | | | |
| hsa-miR- | 4.66 | 5.14 | 4.98 | 5.00 | 4.93 | 0.19 | 14 | 4.31E−02 | 0.35 | 1.3 |
| 618 | | | | | | | | | | |
| hsa-miR- | 13.78 | 13.78 | 13.43 | 13.49 | 13.62 | 0.15 | 100 | 2.11E−02 | 0.33 | 1.3 |
| 23a | | | | | | | | | | |
| hsa-miR- | 12.71 | 13.05 | 12.71 | 12.78 | 12.84 | 0.18 | 100 | 3.48E−02 | −0.37 | 1.3 |
| 199a* | | | | | | | | | | |
| hsa-miR- | 13.38 | 13.41 | 13.00 | 12.96 | 13.18 | 0.19 | 100 | 1.06E−02 | −0.70 | 1.6 |
| 145 | | | | | | | | | | |
| hsa-miR- | 11.70 | 12.21 | 11.60 | 12.05 | 11.67 | 0.40 | 100 | 4.88E−02 | −0.71 | 1.6 |
| 99a | | | | | | | | | | |
| hsa-miR- | 12.94 | 13.05 | 12.65 | 12.85 | 12.86 | 0.15 | 100 | 1.94E−02 | −0.81 | 1.8 |
| 195 | | | | | | | | | | |
| hsa-miR- | 7.09 | 7.44 | 7.43 | 8.10 | 7.41 | 0.44 | 100 | 3.15E−02 | −0.93 | 1.9 |
| 331 | | | | | | | | | | |
| hsa-miR- | 12.68 | 13.13 | 12.70 | 12.76 | 12.68 | 0.33 | 100 | 9.51E−03 | −1.05 | 2.1 |
| 143 | | | | | | | | | | |
| hsa-miR- | 10.10 | 10.47 | 10.32 | 10.53 | 10.17 | 0.33 | 100 | 1.43E−02 | −1.15 | 2.2 |
| 199a | | | | | | | | | | |
| hsa-miR- | 12.38 | 12.55 | 11.96 | 12.37 | 12.30 | 0.19 | 100 | 2.23E−03 | −1.20 | 2.3 |
| 10b | | | | | | | | | | |
| hsa-miR- | 5.86 | 6.72 | 6.94 | 7.16 | 6.69 | 0.44 | 86 | 6.99E−03 | −1.25 | 2.4 |
| 339 | | | | | | | | | | |
| hsa-miR-7 | 9.57 | 9.15 | 10.45 | 10.74 | 9.84 | 0.64 | 100 | 2.62E−02 | −1.35 | 2.5 |
| hsa-miR- | 12.16 | 11.36 | 11.94 | 11.75 | 11.76 | 0.28 | 100 | 3.17E−04 | −1.39 | 2.6 |
| 148a | | | | | | | | | | |
| hsa-miR- | 10.99 | 10.46 | 10.33 | 11.06 | 10.85 | 0.34 | 100 | 3.80E−03 | −1.42 | 2.7 |
| 29b | | | | | | | | | | |
| hsa-miR- | 13.30 | 13.59 | 13.54 | 13.49 | 13.55 | 0.19 | 100 | 7.65E−03 | −1.44 | 2.7 |
| 342 | | | | | | | | | | |
| hsa-miR- | 7.25 | 7.91 | 7.69 | 7.88 | 7.61 | 0.28 | 57 | 2.19E−03 | −1.55 | 2.9 |
| 497 | | | | | | | | | | |
| hsa-miR- | 6.94 | 6.44 | 7.29 | 8.01 | 6.97 | 0.57 | 100 | 7.98E−03 | −1.58 | 3.0 |
| 215 | | | | | | | | | | |
| hsa-miR- | 10.21 | 10.04 | 11.30 | 11.59 | 10.59 | 0.61 | 100 | 2.13E−02 | −1.59 | 3.0 |
| 192 | | | | | | | | | | |
| hsa-miR-17- | 6.07 | 6.07 | 7.18 | 7.83 | 6.80 | 0.63 | 86 | 6.29E−03 | −1.80 | 3.5 |
| 3p | | | | | | | | | | |
| hsa-miR-95 | 9.72 | 8.44 | 9.12 | 10.06 | 9.02 | 0.64 | 100 | 4.05E−02 | −1.83 | 3.5 |
| hsa-miR- | 9.11 | 8.75 | 8.76 | 9.53 | 8.86 | 0.39 | 100 | 1.53E−03 | −1.85 | 3.6 |
| 505 | | | | | | | | | | |
| hsa-miR- | 6.71 | 6.13 | 7.22 | 7.99 | 7.11 | 0.70 | 86 | 9.43E−03 | −1.95 | 3.9 |
| 598 | | | | | | | | | | |
| hsa-miR- | 9.85 | 9.82 | 10.27 | 10.95 | 10.42 | 0.51 | 100 | 1.20E−03 | −1.99 | 4.0 |
| 29c | | | | | | | | | | |
| hsa-miR- | 5.97 | 6.11 | 5.66 | 5.24 | 5.27 | 0.81 | 14 | 1.91E−02 | −2.11 | 4.3 |
| 133b | | | | | | | | | | |
| hsa-miR- | 6.62 | 7.16 | 5.90 | 6.30 | 6.19 | 0.63 | 71 | 5.46E−03 | −2.23 | 4.7 |
| 133a | | | | | | | | | | |
| hsa-miR-1 | 10.70 | 10.19 | 9.58 | 10.00 | 9.58 | 0.84 | 100 | 3.32E−03 | −3.07 | 8.4 |
| hsa-asg- | 2.95 | 3.48 | 3.59 | 3.49 | 3.56 | 0.77 | 0 | 2.06E−05 | 6.71 | 104.3 |
| 5638 | | | | | | | | | | |
| hsa-asg- | 3.70 | 4.47 | 3.68 | 4.15 | 3.96 | 0.36 | 0 | 1.13E−04 | 4.34 | 20.3 |
| 11338 | | | | | | | | | | |
| hsa-asg- | 3.70 | 2.91 | 4.51 | 3.49 | 4.04 | 1.22 | 14 | 6.21E−03 | 4.10 | 17.2 |
| 5630 | | | | | | | | | | |
| hsa-asg- | 2.81 | 2.78 | 2.63 | 2.47 | 2.82 | 0.34 | 0 | 1.66E−03 | 2.91 | 7.5 |
| 13997 | | | | | | | | | | |
| hsa-asg- | 3.27 | 3.68 | 2.28 | 2.72 | 2.97 | 0.44 | 0 | 1.45E−03 | 2.77 | 6.8 |
| 8428 | | | | | | | | | | |
| hsa-asg- | 5.21 | 5.12 | 5.06 | 5.21 | 5.18 | 0.53 | 0 | 3.29E−04 | 2.64 | 6.2 |
| 9186 | | | | | | | | | | |
| hsa-asg- | 3.23 | 2.91 | 3.19 | 2.97 | 3.01 | 0.22 | 0 | 5.93E−04 | 2.57 | 5.9 |
| 1296 | | | | | | | | | | |
| hsa-asg- | 2.52 | 3.15 | 2.98 | 2.81 | 2.87 | 0.34 | 0 | 5.24E−05 | 2.52 | 5.7 |
| 9723 | | | | | | | | | | |
| hsa-asg- | 3.09 | 3.37 | 3.30 | 2.81 | 3.09 | 0.34 | 0 | 1.05E−03 | 2.23 | 4.7 |
| 11380 | | | | | | | | | | |
| hsa-asg- | 3.14 | 3.09 | 3.19 | 4.00 | 3.29 | 0.33 | 0 | 2.75E−03 | 2.10 | 4.3 |
| 2261 | | | | | | | | | | |
| hsa-asg- | 6.03 | 7.32 | 6.38 | 5.77 | 6.48 | 0.67 | 100 | 6.21E−03 | 2.10 | 4.3 |
| 1519 | | | | | | | | | | |
| hsa-asg- | 3.18 | 3.37 | 2.40 | 2.30 | 3.08 | 0.62 | 0 | 7.11E−03 | 2.09 | 4.3 |
| 1794 | | | | | | | | | | |
| hsa-asg- | 4.32 | 4.17 | 4.90 | 4.97 | 4.55 | 0.29 | 0 | 9.72E−05 | 2.03 | 4.1 |
| 12271 | | | | | | | | | | |
| hsa-asg- | 4.21 | 3.98 | 5.14 | 5.46 | 4.38 | 0.67 | 0 | 1.68E−02 | 2.03 | 4.1 |
| 14208 | | | | | | | | | | |
| hsa-asg- | 4.29 | 4.25 | 3.49 | 3.86 | 3.78 | 0.40 | 0 | 1.35E−02 | 1.93 | 3.8 |
| 8486 | | | | | | | | | | |
| hsa-asg- | 8.38 | 8.23 | 8.84 | 9.13 | 8.70 | 0.44 | 14 | 7.16E−04 | 1.90 | 3.7 |
| 5640 | | | | | | | | | | |
| hsa-cand317 | 3.88 | 3.48 | 4.61 | 4.91 | 3.90 | 0.74 | 14 | 4.34E−02 | 1.71 | 3.3 |
| hsa-asg- | 3.52 | 3.15 | 2.63 | 3.56 | 3.32 | 0.41 | 0 | 2.08E−03 | 1.71 | 3.3 |
| 2335 | | | | | | | | | | |
| hsa-asg- | 2.22 | 3.03 | 3.09 | 2.81 | 2.96 | 0.37 | 0 | 1.77E−02 | 1.70 | 3.3 |
| 1587 | | | | | | | | | | |
| hsa-asg- | 4.09 | 5.41 | 2.86 | 5.11 | 4.34 | 0.86 | 0 | 4.25E−02 | 1.63 | 3.1 |
| 4803 | | | | | | | | | | |
| hsa-asg- | 9.37 | 8.64 | 9.11 | 10.21 | 9.28 | 0.60 | 43 | 9.15E−03 | 1.59 | 3.0 |
| 13278 | | | | | | | | | | |
| hsa-asg-497 | 5.64 | 6.69 | 5.31 | 5.62 | 5.78 | 0.43 | 57 | 2.03E−03 | 1.55 | 2.9 |
| hsa-asg- | 4.15 | 4.47 | 3.09 | 5.08 | 4.16 | 0.81 | 0 | 4.31E−02 | 1.52 | 2.9 |
| 9796 | | | | | | | | | | |
| hsa-asg- | 3.48 | 4.14 | 3.49 | 4.89 | 3.97 | 0.60 | 0 | 3.98E−02 | 1.50 | 2.8 |
| 10031 | | | | | | | | | | |
| hsa-asg- | 4.73 | 3.90 | 4.07 | 4.83 | 4.28 | 0.41 | 0 | 2.10E−03 | 1.50 | 2.8 |
| 9980 | | | | | | | | | | |
| hsa-asg- | 4.51 | 4.53 | 4.07 | 4.79 | 4.42 | 0.23 | 0 | 1.29E−02 | 1.49 | 2.8 |
| 12453 | | | | | | | | | | |
| hsa-asg- | 5.52 | 5.81 | 5.28 | 4.81 | 5.25 | 0.38 | 0 | 2.53E−02 | 1.46 | 2.7 |
| 11489 | | | | | | | | | | |
| hsa-asg- | 3.81 | 3.48 | 3.49 | 3.28 | 3.36 | 0.28 | 0 | 2.61E−04 | 1.45 | 2.7 |
| 11361 | | | | | | | | | | |
| hsa-asg- | 6.29 | 5.45 | 6.12 | 5.04 | 5.49 | 0.52 | 29 | 8.72E−03 | 1.43 | 2.7 |
| 12807 | | | | | | | | | | |
| hsa-asg- | 6.14 | 4.31 | 5.14 | 4.71 | 4.92 | 0.59 | 14 | 1.76E−02 | 1.38 | 2.6 |
| 7511 | | | | | | | | | | |
| hsa-asg- | 4.82 | 4.44 | 4.33 | 4.67 | 4.72 | 0.26 | 0 | 1.41E−02 | 1.35 | 2.5 |
| 9762 | | | | | | | | | | |
| hsa-asg- | 6.82 | 6.39 | 5.78 | 6.93 | 6.40 | 0.52 | 0 | 1.63E−02 | 1.29 | 2.4 |
| 12372 | | | | | | | | | | |
| hsa-asg- | 7.73 | 7.15 | 7.34 | 8.45 | 7.66 | 0.64 | 43 | 3.47E−02 | 1.29 | 2.4 |
| 4223 | | | | | | | | | | |
| hsa-asg- | 5.93 | 5.01 | 4.71 | 5.08 | 5.41 | 0.48 | 43 | 1.60E−02 | 1.24 | 2.4 |
| 11402 | | | | | | | | | | |
| hsa-asg- | 6.60 | 6.15 | 5.96 | 6.66 | 6.38 | 0.25 | 71 | 4.50E−04 | 1.24 | 2.4 |
| 8633 | | | | | | | | | | |
| hsa-asg- | 5.05 | 6.19 | 5.61 | 5.74 | 5.71 | 0.44 | 0 | 1.11E−02 | 1.21 | 2.3 |
| 4780 | | | | | | | | | | |
| hsa-asg- | 6.41 | 5.66 | 6.18 | 5.47 | 5.83 | 0.35 | 0 | 3.21E−03 | 1.15 | 2.2 |
| 9117 | | | | | | | | | | |
| hsa-asg- | 4.62 | 5.36 | 4.71 | 4.44 | 4.60 | 0.44 | 14 | 1.97E−02 | 1.14 | 2.2 |
| 1362 | | | | | | | | | | |
| hsa-asg- | 9.36 | 9.85 | 9.37 | 9.86 | 9.44 | 0.42 | 100 | 9.27E−03 | 1.13 | 2.2 |
| 14233 | | | | | | | | | | |
| hsa-asg- | 12.13 | 11.26 | 11.31 | 11.44 | 11.70 | 0.45 | 100 | 1.89E−02 | 1.10 | 2.1 |
| 13309 | | | | | | | | | | |
| hsa-asg- | 7.28 | 6.38 | 5.94 | 6.86 | 6.65 | 0.42 | 71 | 3.49E−02 | 1.10 | 2.1 |
| 13841 | | | | | | | | | | |
| hsa-asg- | 6.27 | 7.18 | 6.38 | 5.73 | 6.23 | 0.48 | 43 | 1.83E−02 | 1.10 | 2.1 |
| 14001 | | | | | | | | | | |
| hsa-asg- | 3.97 | 4.47 | 5.17 | 4.00 | 4.59 | 0.49 | 0 | 2.24E−02 | 1.06 | 2.1 |
| 12320 | | | | | | | | | | |
| hsa-asg- | 6.47 | 6.61 | 6.00 | 7.06 | 6.55 | 0.33 | 100 | 1.63E−02 | 1.05 | 2.1 |
| 9227 | | | | | | | | | | |
| hsa-asg- | 5.79 | 6.11 | 6.05 | 6.36 | 6.12 | 0.21 | 43 | 4.61E−04 | 1.04 | 2.1 |
| 7922 | | | | | | | | | | |
| hsa-asg- | 8.69 | 8.11 | 8.21 | 8.21 | 8.25 | 0.29 | 100 | 2.10E−03 | 1.02 | 2.0 |
| 9261 | | | | | | | | | | |
| hsa-cand732 | 7.38 | 6.50 | 6.81 | 7.13 | 6.80 | 0.39 | 57 | 1.66E−02 | 1.02 | 2.0 |
| hsa-asg- | 5.18 | 5.18 | 4.94 | 4.81 | 5.03 | 0.21 | 0 | 3.23E−04 | 1.02 | 2.0 |
| 13924 | | | | | | | | | | |
| hsa-asg- | 4.64 | 4.10 | 4.14 | 5.59 | 4.63 | 0.55 | 0 | 4.52E−02 | 1.02 | 2.0 |
| 2889 | | | | | | | | | | |
| hsa-asg- | 6.53 | 6.15 | 5.83 | 6.42 | 6.10 | 0.30 | 29 | 5.93E−03 | 1.02 | 2.0 |
| 12381 | | | | | | | | | | |
| hsa-asg- | 6.98 | 6.39 | 7.03 | 5.92 | 6.54 | 0.39 | 86 | 1.15E−02 | 1.02 | 2.0 |
| 8003 | | | | | | | | | | |
| hsa-asg- | 5.08 | 5.08 | 5.31 | 5.34 | 5.06 | 0.26 | 0 | 6.75E−03 | 1.01 | 2.0 |
| 7262 | | | | | | | | | | |
| hsa-asg- | 10.26 | 10.37 | 9.46 | 10.36 | 10.02 | 0.35 | 100 | 4.04E−02 | 0.99 | 2.0 |
| 11850 | | | | | | | | | | |
| hsa-asg- | 6.01 | 5.27 | 5.81 | 5.74 | 5.76 | 0.24 | 0 | 1.22E−03 | 0.98 | 2.0 |
| 7027 | | | | | | | | | | |
| hsa-asg- | 7.96 | 7.77 | 7.71 | 8.37 | 7.87 | 0.30 | 71 | 6.10E−03 | 0.97 | 2.0 |
| 12937 | | | | | | | | | | |
| hsa-asg-345 | 4.58 | 4.44 | 4.76 | 4.56 | 4.71 | 0.19 | 0 | 3.29E−04 | 0.97 | 2.0 |
| hsa-asg- | 5.46 | 5.40 | 4.98 | 5.11 | 5.42 | 0.44 | 43 | 2.66E−02 | 0.96 | 1.9 |
| 4969 | | | | | | | | | | |
| hsa-asg- | 5.65 | 5.73 | 4.98 | 5.26 | 5.44 | 0.30 | 0 | 1.79E−02 | 0.96 | 1.9 |
| 3798 | | | | | | | | | | |
| hsa-asg- | 6.56 | 6.00 | 6.94 | 5.95 | 6.20 | 0.40 | 43 | 1.88E−02 | 0.95 | 1.9 |
| 4703 | | | | | | | | | | |
| hsa-asg- | 3.14 | 3.32 | 3.30 | 3.46 | 3.12 | 0.45 | 0 | 4.96E−02 | 0.95 | 1.9 |
| 8792 | | | | | | | | | | |
| hsa-asg- | 5.35 | 4.97 | 5.06 | 4.60 | 5.05 | 0.38 | 0 | 1.27E−02 | 0.94 | 1.9 |
| 4460 | | | | | | | | | | |
| hsa-asg- | 7.24 | 7.11 | 6.96 | 7.43 | 7.12 | 0.29 | 0 | 5.18E−03 | 0.94 | 1.9 |
| 4026 | | | | | | | | | | |
| hsa-cand421 | 10.62 | 10.83 | 10.39 | 10.88 | 10.62 | 0.26 | 100 | 1.61E−02 | 0.93 | 1.9 |
| hsa-asg- | 7.79 | 7.34 | 7.21 | 7.93 | 7.59 | 0.41 | 100 | 1.88E−02 | 0.93 | 1.9 |
| 3670 | | | | | | | | | | |
| hsa-asg- | 7.49 | 7.14 | 7.29 | 7.16 | 7.22 | 0.16 | 100 | 1.22E−03 | 0.88 | 1.8 |
| 9130 | | | | | | | | | | |
| hsa-asg- | 5.40 | 5.54 | 5.28 | 4.95 | 5.43 | 0.28 | 29 | 4.00E−02 | 0.88 | 1.8 |
| 7783 | | | | | | | | | | |
| hsa-asg- | 5.22 | 5.81 | 5.02 | 4.94 | 5.27 | 0.39 | 43 | 3.35E−02 | 0.86 | 1.8 |
| 3944 | | | | | | | | | | |
| hsa-asg- | 5.00 | 5.40 | 4.94 | 4.60 | 4.93 | 0.30 | 0 | 6.39E−03 | 0.86 | 1.8 |
| 13798 | | | | | | | | | | |
| hsa-asg- | 8.33 | 8.04 | 8.15 | 8.43 | 8.11 | 0.31 | 100 | 8.28E−03 | 0.86 | 1.8 |
| 6870 | | | | | | | | | | |
| hsa-asg- | 4.93 | 5.14 | 5.37 | 4.67 | 4.85 | 0.37 | 14 | 2.70E−02 | 0.85 | 1.8 |
| 2460 | | | | | | | | | | |
| hsa-asg- | 4.18 | 4.17 | 4.21 | 4.81 | 4.43 | 0.28 | 14 | 3.48E−02 | 0.84 | 1.8 |
| 11267 | | | | | | | | | | |
| hsa-asg- | 5.49 | 6.08 | 5.31 | 5.38 | 5.46 | 0.29 | 43 | 8.12E−03 | 0.83 | 1.8 |
| 3604 | | | | | | | | | | |
| hsa-asg- | 5.86 | 6.47 | 6.47 | 5.82 | 6.05 | 0.30 | 43 | 9.81E−03 | 0.80 | 1.7 |
| 4296 | | | | | | | | | | |
| hsa-asg- | 8.80 | 8.21 | 7.77 | 8.07 | 8.19 | 0.35 | 100 | 4.51E−02 | 0.76 | 1.7 |
| 8866 | | | | | | | | | | |
| hsa-asg- | 4.97 | 5.14 | 4.56 | 4.81 | 4.88 | 0.21 | 100 | 5.92E−03 | 0.73 | 1.7 |
| 12471 | | | | | | | | | | |
| hsa-asg- | 7.39 | 7.30 | 7.70 | 7.93 | 7.49 | 0.31 | 100 | 3.18E−02 | 0.72 | 1.7 |
| 11515 | | | | | | | | | | |
| hsa-asg- | 5.59 | 6.03 | 5.92 | 5.52 | 5.80 | 0.26 | 71 | 1.70E−02 | 0.71 | 1.6 |
| 7252 | | | | | | | | | | |
| hsa-asg- | 6.02 | 5.16 | 5.83 | 5.67 | 5.82 | 0.38 | 57 | 4.23E−02 | 0.70 | 1.6 |
| 11458 | | | | | | | | | | |
| hsa-asg- | 9.03 | 8.98 | 8.45 | 8.74 | 8.71 | 0.28 | 0 | 1.98E−02 | 0.69 | 1.6 |
| 13453 | | | | | | | | | | |
| hsa-asg- | 9.58 | 9.30 | 9.81 | 9.23 | 9.35 | 0.25 | 100 | 9.03E−03 | 0.68 | 1.6 |
| 3722 | | | | | | | | | | |
| hsa-asg- | 10.93 | 10.94 | 10.45 | 11.11 | 10.84 | 0.20 | 100 | 3.58E−02 | 0.67 | 1.6 |
| 3992 | | | | | | | | | | |
| hsa-asg- | 6.49 | 6.57 | 5.96 | 6.12 | 6.34 | 0.23 | 14 | 1.39E−02 | 0.66 | 1.6 |
| 4373 | | | | | | | | | | |
| hsa-asg- | 7.22 | 7.00 | 6.92 | 7.50 | 7.08 | 0.21 | 100 | 4.17E−03 | 0.66 | 1.6 |
| 9480 | | | | | | | | | | |
| hsa-asg- | 12.68 | 12.56 | 12.44 | 12.69 | 12.59 | 0.12 | 100 | 9.16E−03 | 0.65 | 1.6 |
| 7939 | | | | | | | | | | |
| hsa-asg- | 5.69 | 6.54 | 6.30 | 6.25 | 6.22 | 0.28 | 100 | 1.86E−02 | 0.64 | 1.6 |
| 4448 | | | | | | | | | | |
| hsa-asg- | 6.42 | 5.81 | 5.94 | 6.19 | 6.20 | 0.26 | 71 | 2.18E−02 | 0.64 | 1.6 |
| 1338 | | | | | | | | | | |
| hsa-asg- | 8.09 | 7.62 | 7.25 | 7.70 | 7.53 | 0.30 | 100 | 2.54E−02 | 0.63 | 1.5 |
| 11617 | | | | | | | | | | |
| hsa-asg-954 | 9.66 | 9.68 | 9.05 | 9.09 | 9.31 | 0.26 | 100 | 1.62E−02 | 0.62 | 1.5 |
| hsa-asg- | 5.85 | 6.15 | 5.63 | 6.58 | 6.01 | 0.33 | 86 | 4.50E−02 | 0.62 | 1.5 |
| 2381 | | | | | | | | | | |
| hsa-asg- | 4.98 | 5.45 | 5.34 | 5.39 | 5.35 | 0.30 | 14 | 2.72E−02 | 0.62 | 1.5 |
| 2697 | | | | | | | | | | |
| hsa-asg- | 5.35 | 5.75 | 5.83 | 5.70 | 5.66 | 0.18 | 0 | 3.79E−03 | 0.59 | 1.5 |
| 2365 | | | | | | | | | | |
| hsa-asg- | 5.21 | 5.20 | 5.21 | 4.89 | 5.09 | 0.12 | 0 | 7.55E−03 | 0.59 | 1.5 |
| 9795 | | | | | | | | | | |
| hsa-asg- | 5.25 | 5.22 | 4.90 | 5.21 | 4.94 | 0.30 | 14 | 4.64E−02 | 0.59 | 1.5 |
| 12457 | | | | | | | | | | |
| hsa-asg- | 6.02 | 6.21 | 5.47 | 5.40 | 5.77 | 0.31 | 14 | 3.91E−02 | 0.58 | 1.5 |
| 2500 | | | | | | | | | | |
| hsa-asg- | 6.84 | 6.79 | 6.76 | 6.83 | 6.84 | 0.12 | 100 | 3.51E−02 | 0.56 | 1.5 |
| 8882 | | | | | | | | | | |
| hsa-asg- | 5.65 | 5.64 | 5.34 | 5.42 | 5.37 | 0.22 | 57 | 1.38E−02 | 0.55 | 1.5 |
| 5973 | | | | | | | | | | |
| hsa-asg- | 5.82 | 6.23 | 5.96 | 5.99 | 6.07 | 0.26 | 86 | 3.62E−02 | 0.54 | 1.5 |
| 6616 | | | | | | | | | | |
| hsa-asg- | 6.47 | 6.12 | 6.14 | 6.22 | 6.29 | 0.14 | 86 | 2.95E−03 | 0.53 | 1.4 |
| 13294 | | | | | | | | | | |
| hsa-asg- | 5.16 | 4.92 | 5.14 | 5.19 | 4.96 | 0.29 | 57 | 4.22E−02 | 0.53 | 1.4 |
| 9521 | | | | | | | | | | |
| hsa-asg- | 8.92 | 8.46 | 8.57 | 8.69 | 8.56 | 0.21 | 100 | 1.63E−02 | 0.52 | 1.4 |
| 7450 | | | | | | | | | | |
| hsa-asg- | 4.39 | 5.01 | 4.61 | 4.40 | 4.53 | 0.23 | 14 | 2.83E−02 | 0.51 | 1.4 |
| 4030 | | | | | | | | | | |
| hsa-asg- | 7.43 | 6.96 | 6.86 | 6.90 | 6.98 | 0.25 | 100 | 4.49E−02 | 0.50 | 1.4 |
| 12406 | | | | | | | | | | |
| hsa-asg- | 5.65 | 5.46 | 5.52 | 5.53 | 5.64 | 0.15 | 57 | 4.11E−03 | 0.48 | 1.4 |
| 12885 | | | | | | | | | | |
| hsa-cand873 | 5.54 | 5.88 | 5.47 | 5.33 | 5.42 | 0.26 | 43 | 4.38E−02 | 0.48 | 1.4 |
| hsa-asg- | 13.31 | 13.25 | 13.23 | 13.29 | 13.30 | 0.06 | 100 | 6.79E−03 | 0.47 | 1.4 |
| 14201 | | | | | | | | | | |
| hsa-asg- | 10.47 | 10.19 | 10.43 | 10.26 | 10.32 | 0.18 | 100 | 4.15E−02 | 0.46 | 1.4 |
| 8568 | | | | | | | | | | |
| hsa-asg- | 8.01 | 7.49 | 7.88 | 7.61 | 7.68 | 0.19 | 57 | 3.96E−02 | 0.45 | 1.4 |
| 3239 | | | | | | | | | | |
| hsa-asg- | 7.39 | 7.25 | 7.18 | 7.03 | 7.17 | 0.13 | 100 | 2.58E−03 | 0.45 | 1.4 |
| 4984 | | | | | | | | | | |
| hsa-asg- | 5.77 | 5.99 | 5.71 | 5.62 | 5.79 | 0.15 | 57 | 7.62E−03 | 0.44 | 1.4 |
| 2093 | | | | | | | | | | |
| hsa-asg-733 | 5.95 | 6.06 | 5.92 | 5.70 | 5.96 | 0.18 | 100 | 1.61E−02 | 0.43 | 1.3 |
| hsa-asg-89 | 6.20 | 6.37 | 6.20 | 5.86 | 6.15 | 0.17 | 100 | 1.60E−02 | 0.40 | 1.3 |
| hsa-asg- | 5.80 | 5.83 | 5.74 | 5.49 | 5.73 | 0.15 | 100 | 1.12E−02 | 0.39 | 1.3 |
| 12816 | | | | | | | | | | |
| hsa-asg- | 5.21 | 5.49 | 5.44 | 5.44 | 5.45 | 0.18 | 0 | 2.11E−02 | 0.39 | 1.3 |
| 11057 | | | | | | | | | | |
| hsa-asg- | 6.34 | 6.35 | 6.08 | 6.07 | 6.20 | 0.12 | 100 | 9.20E−03 | 0.36 | 1.3 |
| 6305 | | | | | | | | | | |
| hsa-asg- | 5.52 | 5.64 | 5.58 | 5.33 | 5.59 | 0.19 | 14 | 3.93E−02 | 0.36 | 1.3 |
| 4587 | | | | | | | | | | |
| hsa-asg- | 6.02 | 5.83 | 5.96 | 5.84 | 5.92 | 0.08 | 100 | 4.34E−02 | 0.16 | 1.1 |
| 2483 | | | | | | | | | | |
| hsa-asg-758 | 6.66 | 6.55 | 6.28 | 6.54 | 6.51 | 0.16 | 100 | 4.22E−02 | −0.29 | 1.2 |
| hsa-asg- | 6.55 | 6.54 | 6.75 | 6.65 | 6.61 | 0.14 | 100 | 2.89E−02 | −0.30 | 1.2 |
| 7410 | | | | | | | | | | |
| hsa-asg- | 10.56 | 10.07 | 10.35 | 10.32 | 10.30 | 0.16 | 100 | 3.48E−02 | −0.33 | 1.3 |
| 2899 | | | | | | | | | | |
| hsa-asg- | 9.43 | 9.22 | 9.31 | 9.60 | 9.33 | 0.17 | 29 | 4.56E−02 | −0.35 | 1.3 |
| 7628 | | | | | | | | | | |
| hsa-asg- | 10.85 | 10.63 | 10.84 | 10.82 | 10.77 | 0.15 | 100 | 1.74E−02 | −0.35 | 1.3 |
| 14034 | | | | | | | | | | |
| hsa-asg- | 10.07 | 9.70 | 10.10 | 10.17 | 9.91 | 0.20 | 100 | 4.83E−02 | −0.37 | 1.3 |
| 8253 | | | | | | | | | | |
| hsa-asg- | 4.97 | 5.14 | 4.90 | 4.97 | 4.95 | 0.17 | 14 | 2.20E−02 | −0.38 | 1.3 |
| 4426 | | | | | | | | | | |
| hsa-asg- | 7.04 | 6.74 | 6.66 | 6.77 | 6.75 | 0.16 | 100 | 3.73E−02 | −0.38 | 1.3 |
| 8655 | | | | | | | | | | |
| hsa-asg- | 11.69 | 11.27 | 11.38 | 11.58 | 11.45 | 0.15 | 100 | 1.44E−02 | −0.39 | 1.3 |
| 10632 | | | | | | | | | | |
| hsa-asg-974 | 6.87 | 6.87 | 6.86 | 7.24 | 6.99 | 0.22 | 100 | 4.65E−02 | −0.39 | 1.3 |
| hsa-asg- | 6.59 | 6.29 | 6.27 | 6.81 | 6.48 | 0.20 | 29 | 3.65E−02 | −0.39 | 1.3 |
| 7218 | | | | | | | | | | |
| hsa-asg-206 | 9.93 | 9.51 | 9.64 | 9.98 | 9.76 | 0.16 | 100 | 3.84E−02 | −0.40 | 1.3 |
| hsa-asg- | 8.12 | 7.98 | 7.84 | 7.71 | 7.88 | 0.21 | 100 | 3.39E−02 | −0.41 | 1.3 |
| 3565 | | | | | | | | | | |
| hsa-cand559 | 7.23 | 7.44 | 7.52 | 7.40 | 7.39 | 0.19 | 100 | 2.71E−02 | −0.41 | 1.3 |
| hsa-asg- | 8.43 | 8.28 | 8.16 | 8.65 | 8.40 | 0.23 | 100 | 4.36E−02 | −0.42 | 1.3 |
| 1809 | | | | | | | | | | |
| hsa-asg- | 9.02 | 8.49 | 8.85 | 8.86 | 8.74 | 0.18 | 100 | 1.81E−02 | −0.42 | 1.3 |
| 4020 | | | | | | | | | | |
| hsa-asg- | 8.42 | 8.16 | 8.21 | 8.48 | 8.27 | 0.17 | 100 | 1.56E−02 | −0.42 | 1.3 |
| 10392 | | | | | | | | | | |
| hsa-asg- | 6.63 | 6.35 | 6.50 | 6.82 | 6.53 | 0.17 | 43 | 1.43E−02 | −0.42 | 1.3 |
| 9501 | | | | | | | | | | |
| hsa-asg-976 | 6.74 | 6.94 | 6.41 | 6.63 | 6.65 | 0.23 | 100 | 4.09E−02 | −0.43 | 1.3 |
| hsa-asg- | 10.13 | 9.79 | 9.88 | 9.88 | 9.92 | 0.11 | 100 | 1.15E−02 | −0.43 | 1.3 |
| 5749 | | | | | | | | | | |
| hsa-asg- | 9.42 | 9.34 | 9.11 | 9.38 | 9.28 | 0.15 | 100 | 1.85E−02 | −0.43 | 1.4 |
| 8631 | | | | | | | | | | |
| hsa-asg- | 9.57 | 9.28 | 9.24 | 9.59 | 9.34 | 0.17 | 14 | 1.23E−02 | −0.44 | 1.4 |
| 7051 | | | | | | | | | | |
| hsa-asg- | 6.02 | 6.00 | 6.23 | 6.30 | 6.08 | 0.17 | 57 | 4.92E−02 | −0.45 | 1.4 |
| 10506 | | | | | | | | | | |
| hsa-asg-507 | 3.27 | 2.78 | 3.19 | 3.28 | 3.05 | 0.21 | 0 | 2.51E−02 | −0.45 | 1.4 |
| hsa-asg- | 8.67 | 8.16 | 8.33 | 8.40 | 8.26 | 0.23 | 100 | 3.98E−02 | −0.45 | 1.4 |
| 6018 | | | | | | | | | | |
| hsa-asg- | 9.72 | 9.42 | 9.46 | 9.83 | 9.57 | 0.18 | 57 | 1.33E−02 | −0.46 | 1.4 |
| 3240 | | | | | | | | | | |
| hsa-asg-504 | 9.05 | 8.87 | 8.78 | 8.93 | 8.86 | 0.13 | 100 | 3.83E−03 | −0.46 | 1.4 |
| hsa-cand110 | 11.04 | 10.68 | 10.64 | 10.96 | 10.78 | 0.16 | 100 | 6.77E−03 | −0.46 | 1.4 |
| hsa-asg- | 11.62 | 11.80 | 11.12 | 11.86 | 11.54 | 0.25 | 100 | 4.83E−02 | −0.46 | 1.4 |
| 3811 | | | | | | | | | | |
| hsa-asg- | 11.11 | 10.76 | 11.19 | 10.96 | 10.95 | 0.17 | 100 | 2.69E−02 | −0.46 | 1.4 |
| 6398 | | | | | | | | | | |
| hsa-asg- | 10.13 | 9.69 | 9.96 | 10.03 | 9.91 | 0.17 | 100 | 1.04E−02 | −0.47 | 1.4 |
| 4731 | | | | | | | | | | |
| hsa-asg- | 10.72 | 10.41 | 10.61 | 10.73 | 10.55 | 0.18 | 100 | 1.28E−02 | −0.47 | 1.4 |
| 7096 | | | | | | | | | | |
| hsa-asg- | 9.63 | 9.31 | 9.41 | 9.41 | 9.34 | 0.18 | 100 | 9.17E−03 | −0.48 | 1.4 |
| 6367 | | | | | | | | | | |
| hsa-asg- | 9.86 | 9.46 | 9.58 | 9.94 | 9.62 | 0.22 | 86 | 3.31E−02 | −0.48 | 1.4 |
| 3456 | | | | | | | | | | |
| hsa-asg- | 7.00 | 6.75 | 6.70 | 6.84 | 6.73 | 0.21 | 100 | 1.84E−02 | −0.49 | 1.4 |
| 1641 | | | | | | | | | | |
| hsa-asg- | 10.38 | 9.87 | 10.29 | 10.21 | 10.11 | 0.21 | 100 | 2.78E−02 | −0.49 | 1.4 |
| 2980 | | | | | | | | | | |
| hsa-asg- | 9.10 | 8.69 | 8.59 | 8.97 | 8.83 | 0.19 | 100 | 2.43E−02 | −0.49 | 1.4 |
| 4828 | | | | | | | | | | |
| hsa-asg- | 9.49 | 9.23 | 9.02 | 9.46 | 9.28 | 0.18 | 100 | 8.39E−03 | −0.50 | 1.4 |
| 9266 | | | | | | | | | | |
| hsa-asg- | 11.05 | 10.69 | 10.91 | 10.90 | 10.82 | 0.14 | 100 | 2.61E−03 | −0.50 | 1.4 |
| 3260 | | | | | | | | | | |
| hsa-asg- | 8.46 | 8.25 | 8.00 | 8.43 | 8.22 | 0.21 | 100 | 1.97E−02 | −0.50 | 1.4 |
| 6802 | | | | | | | | | | |
| hsa-asg- | 5.59 | 6.00 | 6.20 | 6.35 | 5.99 | 0.27 | 29 | 4.20E−02 | −0.51 | 1.4 |
| 7579 | | | | | | | | | | |
| hsa-asg- | 4.09 | 4.56 | 4.64 | 4.00 | 4.35 | 0.28 | 57 | 4.99E−02 | −0.51 | 1.4 |
| 12857 | | | | | | | | | | |
| hsa-asg- | 8.72 | 8.73 | 8.52 | 8.76 | 8.51 | 0.24 | 100 | 2.36E−02 | −0.51 | 1.4 |
| 8421 | | | | | | | | | | |
| hsa-cand583 | 6.19 | 6.06 | 5.90 | 5.74 | 5.94 | 0.22 | 29 | 2.82E−02 | −0.52 | 1.4 |
| hsa-asg- | 9.41 | 9.05 | 9.07 | 9.35 | 9.18 | 0.18 | 100 | 1.04E−02 | −0.52 | 1.4 |
| 1123 | | | | | | | | | | |
| hsa-asg- | 9.57 | 9.19 | 9.93 | 9.42 | 9.47 | 0.23 | 100 | 3.53E−02 | −0.52 | 1.4 |
| 11946 | | | | | | | | | | |
| hsa-asg- | 7.69 | 7.23 | 7.02 | 7.15 | 7.24 | 0.24 | 100 | 3.03E−02 | −0.52 | 1.4 |
| 12953 | | | | | | | | | | |
| hsa-asg- | 8.98 | 8.33 | 8.45 | 8.74 | 8.51 | 0.27 | 100 | 4.69E−02 | −0.52 | 1.4 |
| 10639 | | | | | | | | | | |
| hsa-asg- | 8.33 | 8.27 | 8.20 | 8.53 | 8.19 | 0.23 | 100 | 2.70E−02 | −0.53 | 1.4 |
| 3345 | | | | | | | | | | |
| hsa-asg- | 7.86 | 7.83 | 7.38 | 8.02 | 7.76 | 0.20 | 100 | 9.44E−03 | −0.53 | 1.4 |
| 3230 | | | | | | | | | | |
| hsa-cand441 | 7.87 | 7.60 | 7.33 | 7.86 | 7.58 | 0.26 | 29 | 4.16E−02 | −0.53 | 1.4 |
| hsa-asg- | 10.74 | 10.45 | 10.91 | 10.81 | 10.63 | 0.20 | 100 | 2.06E−02 | −0.53 | 1.4 |
| 3892 | | | | | | | | | | |
| hsa-asg- | 7.27 | 6.84 | 7.04 | 7.41 | 7.12 | 0.18 | 100 | 8.27E−03 | −0.53 | 1.4 |
| 7326 | | | | | | | | | | |
| hsa-asg- | 7.41 | 7.56 | 7.22 | 7.87 | 7.46 | 0.23 | 100 | 2.38E−02 | −0.54 | 1.5 |
| 1174 | | | | | | | | | | |
| hsa-asg- | 6.85 | 7.01 | 6.85 | 7.40 | 7.12 | 0.29 | 14 | 4.14E−02 | −0.54 | 1.5 |
| 3290 | | | | | | | | | | |
| hsa-asg- | 8.55 | 8.31 | 7.92 | 8.30 | 8.26 | 0.20 | 100 | 1.76E−02 | −0.55 | 1.5 |
| 12441 | | | | | | | | | | |
| hsa-asg- | 8.20 | 7.85 | 7.40 | 8.12 | 7.78 | 0.32 | 100 | 4.82E−02 | −0.56 | 1.5 |
| 4502 | | | | | | | | | | |
| hsa-asg- | 9.63 | 9.10 | 9.53 | 9.42 | 9.40 | 0.17 | 14 | 3.42E−03 | −0.56 | 1.5 |
| 11758 | | | | | | | | | | |
| hsa-asg- | 7.26 | 7.29 | 6.83 | 7.51 | 7.15 | 0.26 | 100 | 2.84E−02 | −0.57 | 1.5 |
| 4759 | | | | | | | | | | |
| hsa-asg- | 7.92 | 7.56 | 7.86 | 7.91 | 7.66 | 0.24 | 43 | 1.68E−02 | −0.57 | 1.5 |
| 3808 | | | | | | | | | | |
| hsa-asg- | 8.64 | 8.11 | 7.94 | 8.42 | 8.23 | 0.26 | 100 | 2.15E−02 | −0.57 | 1.5 |
| 11249 | | | | | | | | | | |
| hsa-asg- | 10.02 | 9.77 | 9.75 | 9.91 | 9.75 | 0.19 | 100 | 9.17E−03 | −0.58 | 1.5 |
| 6728 | | | | | | | | | | |
| hsa-asg- | 8.03 | 7.89 | 7.42 | 8.11 | 7.81 | 0.23 | 100 | 3.67E−02 | −0.58 | 1.5 |
| 2891 | | | | | | | | | | |
| hsa-asg- | 4.93 | 5.14 | 5.55 | 5.05 | 5.01 | 0.28 | 29 | 4.49E−02 | −0.58 | 1.5 |
| 14186 | | | | | | | | | | |
| hsa-cand735 | 8.20 | 7.89 | 8.31 | 8.15 | 8.06 | 0.16 | 100 | 1.68E−03 | −0.58 | 1.5 |
| hsa-asg- | 5.43 | 5.59 | 5.28 | 5.81 | 5.58 | 0.19 | 14 | 4.99E−03 | −0.58 | 1.5 |
| 8391 | | | | | | | | | | |
| hsa-asg- | 6.94 | 6.75 | 6.10 | 6.71 | 6.56 | 0.28 | 100 | 2.92E−02 | −0.58 | 1.5 |
| 1617 | | | | | | | | | | |
| hsa-asg- | 8.86 | 8.60 | 8.49 | 8.91 | 8.70 | 0.17 | 100 | 2.38E−03 | −0.59 | 1.5 |
| 2626 | | | | | | | | | | |
| hsa-asg- | 7.19 | 6.83 | 6.67 | 7.47 | 6.95 | 0.28 | 100 | 3.91E−02 | −0.59 | 1.5 |
| 11252 | | | | | | | | | | |
| hsa-asg- | 5.00 | 5.06 | 4.81 | 5.29 | 5.21 | 0.32 | 29 | 4.64E−02 | −0.59 | 1.5 |
| 11585 | | | | | | | | | | |
| hsa-asg- | 7.79 | 7.31 | 7.36 | 7.82 | 7.61 | 0.21 | 100 | 8.13E−03 | −0.59 | 1.5 |
| 10575 | | | | | | | | | | |
| hsa-asg- | 7.73 | 7.44 | 7.29 | 7.69 | 7.40 | 0.23 | 100 | 1.02E−02 | −0.59 | 1.5 |
| 14066 | | | | | | | | | | |
| hsa-asg- | 8.72 | 8.36 | 8.81 | 8.90 | 8.52 | 0.28 | 100 | 2.43E−02 | −0.60 | 1.5 |
| 11729 | | | | | | | | | | |
| hsa-asg- | 8.00 | 8.25 | 7.58 | 7.74 | 7.80 | 0.27 | 100 | 3.23E−02 | −0.60 | 1.5 |
| 11521 | | | | | | | | | | |
| hsa-asg- | 9.05 | 8.72 | 8.96 | 9.05 | 8.94 | 0.14 | 100 | 8.23E−03 | −0.61 | 1.5 |
| 12581 | | | | | | | | | | |
| hsa-asg- | 9.73 | 9.22 | 9.47 | 9.31 | 9.38 | 0.18 | 29 | 2.49E−03 | −0.61 | 1.5 |
| 13079 | | | | | | | | | | |
| hsa-asg- | 5.05 | 5.54 | 4.90 | 5.62 | 5.30 | 0.28 | 14 | 3.63E−02 | −0.61 | 1.5 |
| 7569 | | | | | | | | | | |
| hsa-asg- | 9.22 | 8.86 | 8.71 | 8.98 | 8.94 | 0.19 | 100 | 9.37E−03 | −0.62 | 1.5 |
| 3462 | | | | | | | | | | |
| hsa-asg- | 7.07 | 6.84 | 6.93 | 7.25 | 7.00 | 0.27 | 100 | 4.53E−02 | −0.62 | 1.5 |
| 8227 | | | | | | | | | | |
| hsa-asg-508 | 6.71 | 6.64 | 6.35 | 6.92 | 6.48 | 0.31 | 86 | 3.32E−02 | −0.62 | 1.5 |
| hsa-asg- | 7.97 | 7.72 | 7.47 | 8.34 | 7.78 | 0.29 | 100 | 4.94E−02 | −0.62 | 1.5 |
| 2580 | | | | | | | | | | |
| hsa-asg- | 7.64 | 7.68 | 7.56 | 7.85 | 7.60 | 0.28 | 100 | 2.31E−02 | −0.63 | 1.5 |
| 7687 | | | | | | | | | | |
| hsa-asg-688 | 7.91 | 7.40 | 8.14 | 7.54 | 7.69 | 0.25 | 100 | 1.49E−02 | −0.63 | 1.5 |
| hsa-asg- | 8.25 | 8.21 | 7.68 | 8.28 | 8.02 | 0.28 | 100 | 1.79E−02 | −0.63 | 1.6 |
| 3746 | | | | | | | | | | |
| hsa-asg- | 5.68 | 5.33 | 5.66 | 5.95 | 5.54 | 0.30 | 14 | 4.42E−02 | −0.64 | 1.6 |
| 2041 | | | | | | | | | | |
| hsa-asg-819 | 8.17 | 7.75 | 7.65 | 8.07 | 7.76 | 0.32 | 100 | 4.78E−02 | −0.64 | 1.6 |
| hsa-asg- | 5.08 | 5.45 | 4.66 | 5.07 | 5.02 | 0.27 | 0 | 1.64E−02 | −0.64 | 1.6 |
| 4200 | | | | | | | | | | |
| hsa-asg- | 6.76 | 7.17 | 7.08 | 7.45 | 7.19 | 0.26 | 100 | 2.23E−02 | −0.64 | 1.6 |
| 4469 | | | | | | | | | | |
| hsa-asg- | 5.29 | 5.04 | 5.02 | 5.67 | 5.16 | 0.30 | 29 | 2.09E−02 | −0.65 | 1.6 |
| 10183 | | | | | | | | | | |
| hsa-cand523 | 6.46 | 6.15 | 6.12 | 6.18 | 6.11 | 0.22 | 43 | 5.92E−03 | −0.65 | 1.6 |
| hsa-asg- | 6.44 | 6.76 | 6.28 | 6.57 | 6.42 | 0.24 | 43 | 3.54E−02 | −0.65 | 1.6 |
| 8393 | | | | | | | | | | |
| hsa-asg- | 6.37 | 6.69 | 6.70 | 6.41 | 6.66 | 0.21 | 100 | 4.15E−03 | −0.66 | 1.6 |
| 9729 | | | | | | | | | | |
| hsa-asg- | 6.70 | 6.46 | 6.33 | 6.83 | 6.59 | 0.18 | 43 | 6.64E−03 | −0.66 | 1.6 |
| 6675 | | | | | | | | | | |
| hsa-asg- | 8.37 | 8.11 | 8.23 | 8.18 | 8.11 | 0.22 | 100 | 4.42E−03 | −0.66 | 1.6 |
| 1813 | | | | | | | | | | |
| hsa-asg- | 6.57 | 6.24 | 5.98 | 6.75 | 6.38 | 0.24 | 71 | 8.03E−03 | −0.67 | 1.6 |
| 8562 | | | | | | | | | | |
| hsa-asg- | 7.46 | 7.71 | 7.43 | 7.38 | 7.45 | 0.35 | 100 | 3.60E−02 | −0.67 | 1.6 |
| 11479 | | | | | | | | | | |
| hsa-asg- | 9.64 | 9.49 | 8.79 | 9.50 | 9.22 | 0.32 | 14 | 2.54E−02 | −0.67 | 1.6 |
| 5379 | | | | | | | | | | |
| hsa-asg- | 6.34 | 6.16 | 6.25 | 6.45 | 6.24 | 0.30 | 14 | 1.80E−02 | −0.68 | 1.6 |
| 11563 | | | | | | | | | | |
| hsa-asg- | 7.55 | 7.05 | 6.97 | 7.26 | 7.20 | 0.18 | 100 | 2.32E−03 | −0.68 | 1.6 |
| 2131 | | | | | | | | | | |
| hsa-asg- | 6.87 | 6.46 | 6.44 | 6.87 | 6.71 | 0.22 | 100 | 1.89E−02 | −0.69 | 1.6 |
| 5289 | | | | | | | | | | |
| hsa-asg- | 6.47 | 6.45 | 6.25 | 6.98 | 6.63 | 0.31 | 43 | 2.33E−02 | −0.69 | 1.6 |
| 8565 | | | | | | | | | | |
| hsa-asg- | 6.09 | 5.92 | 5.78 | 5.65 | 5.76 | 0.20 | 57 | 2.21E−03 | −0.69 | 1.6 |
| 4599 | | | | | | | | | | |
| hsa-asg- | 6.26 | 5.77 | 5.83 | 6.61 | 6.12 | 0.39 | 29 | 4.43E−02 | −0.70 | 1.6 |
| 3340 | | | | | | | | | | |
| hsa-asg- | 6.56 | 6.17 | 6.75 | 6.27 | 6.39 | 0.20 | 71 | 7.84E−03 | −0.70 | 1.6 |
| 3694 | | | | | | | | | | |
| hsa-asg- | 12.36 | 12.02 | 12.29 | 12.59 | 12.37 | 0.22 | 100 | 9.45E−03 | −0.70 | 1.6 |
| 9530 | | | | | | | | | | |
| hsa-asg- | 8.21 | 8.11 | 7.37 | 8.26 | 7.95 | 0.34 | 100 | 3.43E−02 | −0.70 | 1.6 |
| 5085 | | | | | | | | | | |
| hsa-asg- | 6.83 | 6.56 | 7.22 | 6.82 | 6.85 | 0.24 | 71 | 7.23E−03 | −0.71 | 1.6 |
| 2588 | | | | | | | | | | |
| hsa-asg- | 6.93 | 7.18 | 6.82 | 7.21 | 7.03 | 0.18 | 100 | 2.20E−03 | −0.71 | 1.6 |
| 5061 | | | | | | | | | | |
| hsa-asg- | 8.41 | 8.05 | 7.85 | 8.36 | 8.13 | 0.24 | 100 | 4.88E−03 | −0.72 | 1.6 |
| 11155 | | | | | | | | | | |
| hsa-asg- | 3.97 | 4.10 | 4.24 | 3.72 | 4.01 | 0.17 | 14 | 2.90E−03 | −0.72 | 1.6 |
| 8672 | | | | | | | | | | |
| hsa-asg- | 7.38 | 7.25 | 6.46 | 7.11 | 7.00 | 0.33 | 100 | 3.40E−02 | −0.72 | 1.7 |
| 1576 | | | | | | | | | | |
| hsa-asg- | 6.62 | 6.35 | 6.43 | 6.59 | 6.31 | 0.37 | 29 | 4.16E−02 | −0.72 | 1.7 |
| 7730 | | | | | | | | | | |
| hsa-asg- | 9.92 | 9.61 | 9.48 | 9.80 | 9.78 | 0.19 | 86 | 4.74E−03 | −0.73 | 1.7 |
| 12247 | | | | | | | | | | |
| hsa-asg- | 7.72 | 7.52 | 7.04 | 7.49 | 7.25 | 0.33 | 100 | 2.01E−02 | −0.73 | 1.7 |
| 9511 | | | | | | | | | | |
| hsa-asg- | 6.41 | 6.43 | 5.55 | 5.73 | 6.02 | 0.33 | 71 | 2.24E−02 | −0.73 | 1.7 |
| 8959 | | | | | | | | | | |
| hsa-asg-797 | 5.43 | 5.38 | 5.14 | 5.48 | 5.32 | 0.14 | 14 | 5.40E−04 | −0.73 | 1.7 |
| hsa-asg-271 | 4.53 | 4.56 | 4.21 | 4.91 | 4.46 | 0.25 | 14 | 5.85E−03 | −0.73 | 1.7 |
| hsa-asg- | 11.61 | 11.16 | 11.31 | 11.87 | 11.49 | 0.27 | 100 | 3.14E−02 | −0.73 | 1.7 |
| 2750 | | | | | | | | | | |
| hsa-asg- | 5.84 | 6.63 | 6.66 | 6.01 | 6.31 | 0.34 | 86 | 3.14E−02 | −0.74 | 1.7 |
| 2693 | | | | | | | | | | |
| hsa-asg-53 | 10.14 | 9.70 | 9.68 | 10.04 | 9.85 | 0.17 | 100 | 9.81E−04 | −0.74 | 1.7 |
| hsa-asg- | 9.52 | 9.33 | 9.65 | 9.45 | 9.37 | 0.19 | 100 | 1.20E−02 | −0.74 | 1.7 |
| 5032 | | | | | | | | | | |
| hsa-asg- | 7.51 | 7.23 | 7.06 | 7.41 | 7.25 | 0.16 | 100 | 3.18E−03 | −0.74 | 1.7 |
| 6892 | | | | | | | | | | |
| hsa-asg- | 7.79 | 6.85 | 7.00 | 6.75 | 6.99 | 0.38 | 100 | 3.64E−02 | −0.75 | 1.7 |
| 1911 | | | | | | | | | | |
| hsa-asg- | 7.13 | 6.79 | 6.72 | 7.04 | 6.73 | 0.33 | 86 | 4.95E−02 | −0.75 | 1.7 |
| 8675 | | | | | | | | | | |
| hsa-asg-809 | 6.51 | 6.49 | 5.76 | 6.38 | 6.18 | 0.35 | 57 | 2.63E−02 | −0.75 | 1.7 |
| hsa-asg- | 8.03 | 7.57 | 7.81 | 8.30 | 7.87 | 0.25 | 100 | 2.50E−02 | −0.75 | 1.7 |
| 11893 | | | | | | | | | | |
| hsa-asg- | 8.18 | 8.03 | 7.48 | 8.27 | 7.93 | 0.28 | 100 | 4.33E−02 | −0.75 | 1.7 |
| 1861 | | | | | | | | | | |
| hsa-asg- | 6.00 | 6.13 | 6.08 | 6.14 | 6.19 | 0.24 | 100 | 3.52E−03 | −0.77 | 1.7 |
| 6651 | | | | | | | | | | |
| hsa-asg-471 | 8.22 | 8.20 | 8.26 | 8.17 | 8.18 | 0.07 | 100 | 2.36E−05 | −0.77 | 1.7 |
| hsa-asg- | 5.59 | 6.32 | 5.55 | 5.65 | 5.92 | 0.40 | 14 | 3.65E−02 | −0.77 | 1.7 |
| 10861 | | | | | | | | | | |
| hsa-asg- | 8.44 | 8.83 | 8.12 | 8.89 | 8.53 | 0.28 | 100 | 8.08E−03 | −0.78 | 1.7 |
| 4310 | | | | | | | | | | |
| hsa-asg- | 7.97 | 8.26 | 7.75 | 8.05 | 8.06 | 0.41 | 100 | 3.48E−02 | −0.80 | 1.7 |
| 7153 | | | | | | | | | | |
| hsa-asg- | 5.48 | 5.71 | 5.49 | 6.18 | 5.74 | 0.26 | 43 | 8.95E−03 | −0.81 | 1.8 |
| 6879 | | | | | | | | | | |
| hsa-asg- | 5.90 | 5.88 | 5.66 | 6.63 | 6.04 | 0.33 | 14 | 1.45E−02 | −0.81 | 1.8 |
| 7352 | | | | | | | | | | |
| hsa-asg- | 7.54 | 7.35 | 7.24 | 7.28 | 7.45 | 0.25 | 100 | 3.40E−03 | −0.82 | 1.8 |
| 12775 | | | | | | | | | | |
| hsa-asg- | 8.06 | 8.07 | 7.04 | 8.28 | 7.91 | 0.40 | 100 | 3.40E−02 | −0.83 | 1.8 |
| 13613 | | | | | | | | | | |
| hsa-asg- | 2.27 | 2.59 | 2.75 | 3.39 | 2.75 | 0.40 | 0 | 3.92E−02 | −0.83 | 1.8 |
| 9748 | | | | | | | | | | |
| hsa-asg- | 6.88 | 7.06 | 6.84 | 7.05 | 6.89 | 0.13 | 100 | 1.29E−03 | −0.83 | 1.8 |
| 7640 | | | | | | | | | | |
| hsa-asg- | 7.41 | 6.54 | 6.90 | 7.16 | 6.90 | 0.31 | 100 | 1.01E−02 | −0.84 | 1.8 |
| 10971 | | | | | | | | | | |
| hsa-asg- | 9.64 | 8.99 | 9.85 | 9.19 | 9.33 | 0.33 | 14 | 1.95E−02 | −0.84 | 1.8 |
| 6092 | | | | | | | | | | |
| hsa-asg-813 | 5.40 | 5.18 | 4.90 | 6.22 | 5.47 | 0.43 | 14 | 3.47E−02 | −0.84 | 1.8 |
| hsa-asg- | 7.79 | 7.54 | 7.17 | 7.98 | 7.60 | 0.27 | 100 | 3.99E−03 | −0.84 | 1.8 |
| 6437 | | | | | | | | | | |
| hsa-asg- | 8.50 | 8.10 | 8.12 | 8.15 | 8.27 | 0.17 | 100 | 2.71E−04 | −0.84 | 1.8 |
| 12946 | | | | | | | | | | |
| hsa-asg- | 8.90 | 8.28 | 8.40 | 8.89 | 8.53 | 0.26 | 100 | 3.02E−03 | −0.85 | 1.8 |
| 6948 | | | | | | | | | | |
| hsa-asg- | 7.97 | 7.23 | 7.51 | 8.28 | 7.68 | 0.39 | 43 | 2.85E−02 | −0.86 | 1.8 |
| 11486 | | | | | | | | | | |
| hsa-cand711 | 10.23 | 9.89 | 9.90 | 10.09 | 9.98 | 0.14 | 100 | 6.98E−05 | −0.86 | 1.8 |
| hsa-cand588 | 6.47 | 6.23 | 6.52 | 7.43 | 6.66 | 0.45 | 86 | 3.57E−02 | −0.88 | 1.8 |
| hsa-asg-555 | 7.31 | 7.21 | 7.52 | 7.62 | 7.21 | 0.34 | 100 | 2.71E−02 | −0.88 | 1.8 |
| hsa-asg- | 7.73 | 7.47 | 8.56 | 8.09 | 7.80 | 0.41 | 43 | 2.37E−02 | −0.88 | 1.8 |
| 6149 | | | | | | | | | | |
| hsa-asg- | 8.09 | 7.91 | 7.21 | 8.35 | 7.76 | 0.40 | 43 | 3.83E−02 | −0.88 | 1.8 |
| 9920 | | | | | | | | | | |
| hsa-asg- | 7.44 | 6.84 | 6.84 | 7.56 | 7.16 | 0.28 | 100 | 1.60E−02 | −0.88 | 1.8 |
| 1391 | | | | | | | | | | |
| hsa-asg- | 7.39 | 7.38 | 6.75 | 7.57 | 7.06 | 0.41 | 100 | 2.63E−02 | −0.88 | 1.8 |
| 3150 | | | | | | | | | | |
| hsa-asg- | 7.02 | 7.19 | 6.25 | 7.30 | 7.00 | 0.42 | 86 | 3.49E−02 | −0.88 | 1.8 |
| 13829 | | | | | | | | | | |
| hsa-asg- | 7.26 | 7.18 | 6.44 | 7.26 | 6.79 | 0.48 | 86 | 4.66E−02 | −0.88 | 1.8 |
| 9382 | | | | | | | | | | |
| hsa-cand855 | 7.29 | 6.56 | 6.86 | 6.91 | 6.79 | 0.34 | 71 | 1.42E−02 | −0.88 | 1.8 |
| hsa-asg- | 8.40 | 7.98 | 7.22 | 8.52 | 7.99 | 0.42 | 100 | 2.42E−02 | −0.89 | 1.9 |
| 10716 | | | | | | | | | | |
| hsa-asg- | 9.09 | 8.81 | 8.38 | 8.97 | 8.80 | 0.27 | 100 | 3.11E−03 | −0.90 | 1.9 |
| 11698 | | | | | | | | | | |
| hsa-cand902 | 6.04 | 6.44 | 5.81 | 6.41 | 6.09 | 0.33 | 29 | 8.47E−03 | −0.90 | 1.9 |
| hsa-asg- | 9.36 | 8.84 | 8.89 | 9.14 | 9.16 | 0.24 | 100 | 1.60E−03 | −0.92 | 1.9 |
| 12919 | | | | | | | | | | |
| hsa-asg- | 5.97 | 4.73 | 5.44 | 5.66 | 5.34 | 0.42 | 14 | 2.03E−02 | −0.92 | 1.9 |
| 4261 | | | | | | | | | | |
| hsa-asg- | 7.20 | 7.05 | 7.54 | 7.10 | 7.22 | 0.16 | 100 | 1.72E−04 | −0.92 | 1.9 |
| 1153 | | | | | | | | | | |
| hsa-asg- | 6.37 | 6.30 | 6.16 | 6.91 | 6.43 | 0.28 | 71 | 1.75E−02 | −0.92 | 1.9 |
| 3841 | | | | | | | | | | |
| hsa-asg- | 11.47 | 11.22 | 11.49 | 11.61 | 11.44 | 0.27 | 100 | 6.61E−03 | −0.92 | 1.9 |
| 3231 | | | | | | | | | | |
| hsa-asg-225 | 5.62 | 5.40 | 5.81 | 6.06 | 5.48 | 0.36 | 14 | 1.67E−02 | −0.93 | 1.9 |
| hsa-asg- | 8.14 | 8.20 | 7.51 | 8.38 | 7.92 | 0.34 | 100 | 1.26E−02 | −0.93 | 1.9 |
| 2017 | | | | | | | | | | |
| hsa-asg- | 7.59 | 7.31 | 7.03 | 8.04 | 7.33 | 0.37 | 100 | 1.23E−02 | −0.93 | 1.9 |
| 6623 | | | | | | | | | | |
| hsa-asg- | 6.20 | 5.86 | 5.96 | 5.75 | 5.83 | 0.21 | 29 | 6.69E−04 | −0.93 | 1.9 |
| 9526 | | | | | | | | | | |
| hsa-asg- | 6.45 | 5.24 | 5.81 | 5.74 | 5.88 | 0.48 | 14 | 3.57E−02 | −0.93 | 1.9 |
| 3014 | | | | | | | | | | |
| hsa-asg- | 7.36 | 8.29 | 7.94 | 8.00 | 7.93 | 0.48 | 100 | 3.31E−02 | −0.94 | 1.9 |
| 12957 | | | | | | | | | | |
| hsa-asg- | 4.62 | 5.01 | 4.00 | 4.81 | 4.76 | 0.38 | 14 | 1.68E−02 | −0.95 | 1.9 |
| 2564 | | | | | | | | | | |
| hsa-asg- | 5.84 | 5.33 | 5.78 | 5.92 | 5.75 | 0.20 | 29 | 5.26E−03 | −0.96 | 2.0 |
| 10473 | | | | | | | | | | |
| hsa-asg- | 4.09 | 4.14 | 3.68 | 4.20 | 3.75 | 0.43 | 0 | 2.32E−02 | −0.97 | 2.0 |
| 8303 | | | | | | | | | | |
| hsa-asg- | 5.58 | 6.30 | 6.32 | 6.18 | 6.26 | 0.40 | 100 | 1.94E−02 | −0.97 | 2.0 |
| 11310 | | | | | | | | | | |
| hsa-asg- | 7.03 | 6.70 | 6.68 | 6.74 | 6.83 | 0.33 | 100 | 5.73E−03 | −0.97 | 2.0 |
| 6831 | | | | | | | | | | |
| hsa-asg- | 7.41 | 8.23 | 7.88 | 7.80 | 7.91 | 0.49 | 71 | 3.60E−02 | −0.97 | 2.0 |
| 11373 | | | | | | | | | | |
| hsa-asg- | 6.69 | 7.48 | 7.00 | 7.31 | 7.10 | 0.33 | 100 | 4.64E−03 | −1.00 | 2.0 |
| 6005 | | | | | | | | | | |
| hsa-asg- | 10.16 | 9.78 | 9.73 | 9.76 | 9.73 | 0.22 | 86 | 1.76E−03 | −1.01 | 2.0 |
| 4654 | | | | | | | | | | |
| hsa-asg- | 8.59 | 8.50 | 8.40 | 8.84 | 8.55 | 0.42 | 100 | 1.56E−02 | −1.01 | 2.0 |
| 9403 | | | | | | | | | | |
| hsa-asg- | 9.08 | 8.61 | 8.72 | 8.94 | 8.71 | 0.30 | 100 | 2.51E−03 | −1.01 | 2.0 |
| 7893 | | | | | | | | | | |
| hsa-asg- | 7.76 | 8.15 | 9.01 | 8.03 | 8.19 | 0.51 | 100 | 3.54E−02 | −1.05 | 2.1 |
| 13000 | | | | | | | | | | |
| hsa-asg- | 6.34 | 7.03 | 7.09 | 7.35 | 6.98 | 0.47 | 100 | 2.02E−02 | −1.05 | 2.1 |
| 10883 | | | | | | | | | | |
| hsa-asg- | 6.19 | 6.11 | 6.37 | 6.57 | 6.12 | 0.27 | 29 | 3.24E−03 | −1.06 | 2.1 |
| 1689 | | | | | | | | | | |
| hsa-asg- | 7.21 | 7.45 | 6.33 | 7.66 | 7.14 | 0.52 | 71 | 4.62E−02 | −1.06 | 2.1 |
| 9412 | | | | | | | | | | |
| hsa-asg- | 9.06 | 8.59 | 9.13 | 8.71 | 8.73 | 0.26 | 100 | 2.57E−03 | −1.07 | 2.1 |
| 3271 | | | | | | | | | | |
| hsa-asg- | 7.92 | 7.41 | 6.44 | 7.75 | 7.41 | 0.49 | 86 | 3.10E−02 | −1.08 | 2.1 |
| 13559 | | | | | | | | | | |
| hsa-asg- | 4.77 | 4.75 | 5.31 | 5.52 | 4.81 | 0.45 | 14 | 1.38E−02 | −1.09 | 2.1 |
| 11898 | | | | | | | | | | |
| hsa-asg- | 4.15 | 4.90 | 4.39 | 5.46 | 4.53 | 0.49 | 0 | 1.97E−02 | −1.10 | 2.1 |
| 3081 | | | | | | | | | | |
| hsa-asg- | 7.29 | 6.62 | 6.20 | 7.41 | 6.82 | 0.42 | 71 | 2.08E−02 | −1.10 | 2.1 |
| 2858 | | | | | | | | | | |
| hsa-asg-278 | 6.33 | 6.52 | 5.76 | 6.70 | 6.08 | 0.55 | 43 | 3.82E−02 | −1.11 | 2.2 |
| hsa-asg- | 9.23 | 9.06 | 8.97 | 9.07 | 8.91 | 0.23 | 100 | 4.65E−04 | −1.11 | 2.2 |
| 5423 | | | | | | | | | | |
| hsa-asg- | 5.08 | 5.77 | 5.66 | 5.90 | 5.58 | 0.31 | 29 | 2.50E−03 | −1.11 | 2.2 |
| 9257 | | | | | | | | | | |
| hsa-asg- | 7.31 | 6.58 | 6.82 | 7.81 | 7.05 | 0.48 | 100 | 1.85E−02 | −1.12 | 2.2 |
| 10197 | | | | | | | | | | |
| hsa-asg- | 8.49 | 7.73 | 7.72 | 8.15 | 8.13 | 0.32 | 100 | 2.69E−03 | −1.14 | 2.2 |
| 6507 | | | | | | | | | | |
| hsa-asg- | 6.64 | 6.24 | 6.27 | 7.16 | 6.62 | 0.33 | 86 | 5.68E−03 | −1.14 | 2.2 |
| 9015 | | | | | | | | | | |
| hsa-asg- | 3.00 | 3.03 | 3.30 | 2.47 | 3.00 | 0.32 | 0 | 2.23E−03 | −1.15 | 2.2 |
| 5460 | | | | | | | | | | |
| hsa-asg- | 10.06 | 10.04 | 9.91 | 10.57 | 10.19 | 0.44 | 100 | 9.65E−03 | −1.16 | 2.2 |
| 13308 | | | | | | | | | | |
| hsa-asg- | 6.30 | 5.56 | 5.28 | 6.05 | 5.79 | 0.34 | 29 | 5.93E−03 | −1.16 | 2.2 |
| 4440 | | | | | | | | | | |
| hsa-asg- | 7.26 | 7.20 | 6.71 | 7.54 | 7.13 | 0.26 | 100 | 3.42E−03 | −1.16 | 2.2 |
| 1375 | | | | | | | | | | |
| hsa-asg- | 7.11 | 6.74 | 6.28 | 6.97 | 6.74 | 0.31 | 71 | 1.16E−02 | −1.17 | 2.3 |
| 8763 | | | | | | | | | | |
| hsa-asg- | 8.90 | 10.21 | 9.61 | 9.90 | 9.76 | 0.54 | 100 | 2.17E−02 | −1.19 | 2.3 |
| 2872 | | | | | | | | | | |
| hsa-asg- | 7.41 | 8.16 | 7.48 | 7.69 | 7.83 | 0.42 | 100 | 6.30E−03 | −1.20 | 2.3 |
| 12460 | | | | | | | | | | |
| hsa-asg- | 6.64 | 6.59 | 6.28 | 6.91 | 6.44 | 0.40 | 29 | 5.62E−03 | −1.21 | 2.3 |
| 8138 | | | | | | | | | | |
| hsa-asg- | 10.21 | 10.17 | 10.09 | 10.64 | 10.31 | 0.38 | 100 | 3.56E−03 | −1.21 | 2.3 |
| 5304 | | | | | | | | | | |
| hsa-asg- | 6.63 | 6.25 | 6.49 | 6.79 | 6.41 | 0.26 | 14 | 1.14E−02 | −1.21 | 2.3 |
| 4971 | | | | | | | | | | |
| hsa-asg- | 7.85 | 7.27 | 7.45 | 7.45 | 7.38 | 0.25 | 100 | 6.72E−04 | −1.23 | 2.4 |
| 9343 | | | | | | | | | | |
| hsa-asg- | 6.19 | 6.52 | 6.21 | 6.96 | 6.36 | 0.31 | 71 | 1.00E−03 | −1.24 | 2.4 |
| 8271 | | | | | | | | | | |
| hsa-asg- | 7.70 | 8.18 | 8.07 | 8.66 | 8.30 | 0.35 | 100 | 4.90E−03 | −1.25 | 2.4 |
| 13260 | | | | | | | | | | |
| hsa-asg- | 6.17 | 6.19 | 5.63 | 4.94 | 5.54 | 0.62 | 14 | 2.98E−02 | −1.26 | 2.4 |
| 12105 | | | | | | | | | | |
| hsa-asg- | 4.21 | 4.68 | 3.03 | 4.10 | 4.06 | 0.66 | 29 | 4.45E−02 | −1.26 | 2.4 |
| 7685 | | | | | | | | | | |
| hsa-asg- | 6.53 | 6.61 | 7.48 | 7.28 | 6.94 | 0.42 | 100 | 4.87E−03 | −1.27 | 2.4 |
| 3360 | | | | | | | | | | |
| hsa-asg- | 5.45 | 5.95 | 6.49 | 6.27 | 6.06 | 0.49 | 57 | 2.32E−02 | −1.28 | 2.4 |
| 5576 | | | | | | | | | | |
| hsa-asg- | 6.34 | 5.88 | 5.40 | 6.34 | 5.94 | 0.40 | 29 | 1.37E−02 | −1.29 | 2.4 |
| 4843 | | | | | | | | | | |
| hsa-asg- | 5.77 | 6.28 | 5.90 | 6.18 | 6.17 | 0.49 | 29 | 1.41E−02 | −1.29 | 2.4 |
| 7009 | | | | | | | | | | |
| hsa-asg- | 4.98 | 4.83 | 5.34 | 4.76 | 5.04 | 0.29 | 0 | 7.84E−03 | −1.30 | 2.5 |
| 8928 | | | | | | | | | | |
| hsa-asg- | 5.90 | 5.78 | 5.55 | 6.29 | 5.67 | 0.38 | 14 | 4.72E−03 | −1.32 | 2.5 |
| 12777 | | | | | | | | | | |
| hsa-asg- | 5.29 | 6.38 | 6.35 | 6.54 | 6.27 | 0.59 | 43 | 2.15E−02 | −1.35 | 2.6 |
| 7069 | | | | | | | | | | |
| hsa-cand965 | 5.89 | 7.57 | 7.23 | 7.51 | 7.29 | 0.66 | 29 | 4.98E−02 | −1.38 | 2.6 |
| hsa-asg- | 5.92 | 5.95 | 6.08 | 6.24 | 6.06 | 0.18 | 43 | 1.88E−03 | −1.38 | 2.6 |
| 13693 | | | | | | | | | | |
| hsa-asg- | 6.40 | 6.00 | 5.14 | 6.55 | 6.05 | 0.45 | 43 | 7.16E−03 | −1.40 | 2.6 |
| 8329 | | | | | | | | | | |
| hsa-asg- | 7.21 | 6.85 | 6.38 | 7.46 | 6.74 | 0.52 | 71 | 1.05E−02 | −1.43 | 2.7 |
| 3597 | | | | | | | | | | |
| hsa-asg- | 5.99 | 6.19 | 6.05 | 5.82 | 6.05 | 0.30 | 57 | 6.21E−03 | −1.44 | 2.7 |
| 9852 | | | | | | | | | | |
| hsa-asg- | 4.29 | 5.06 | 4.45 | 4.18 | 4.41 | 0.34 | 0 | 1.68E−03 | −1.45 | 2.7 |
| 3107 | | | | | | | | | | |
| hsa-asg- | 12.09 | 11.62 | 12.09 | 12.34 | 12.07 | 0.52 | 100 | 7.47E−03 | −1.47 | 2.8 |
| 14245 | | | | | | | | | | |
| hsa-asg- | 5.55 | 6.37 | 5.92 | 6.27 | 6.05 | 0.30 | 29 | 1.95E−03 | −1.47 | 2.8 |
| 6949 | | | | | | | | | | |
| hsa-asg- | 5.51 | 5.67 | 5.34 | 5.86 | 5.54 | 0.20 | 57 | 2.22E−04 | −1.52 | 2.9 |
| 7319 | | | | | | | | | | |
| hsa-asg- | 6.32 | 6.22 | 5.63 | 6.72 | 6.30 | 0.45 | 43 | 7.44E−03 | −1.52 | 2.9 |
| 9022 | | | | | | | | | | |
| hsa-asg- | 6.52 | 6.80 | 5.94 | 6.66 | 6.40 | 0.34 | 71 | 5.08E−04 | −1.56 | 2.9 |
| 12246 | | | | | | | | | | |
| hsa-asg- | 7.13 | 7.51 | 7.37 | 7.66 | 7.46 | 0.56 | 86 | 6.76E−03 | −1.58 | 3.0 |
| 8917 | | | | | | | | | | |
| hsa-asg- | 6.60 | 6.87 | 6.20 | 6.42 | 6.85 | 0.51 | 100 | 5.18E−03 | −1.60 | 3.0 |
| 13244 | | | | | | | | | | |
| hsa-cand345 | 6.17 | 6.16 | 5.85 | 6.83 | 6.10 | 0.41 | 71 | 1.58E−03 | −1.61 | 3.0 |
| hsa-asg- | 5.99 | 7.07 | 7.51 | 7.63 | 7.32 | 0.78 | 100 | 4.16E−02 | −1.62 | 3.1 |
| 12702 | | | | | | | | | | |
| hsa-asg- | 6.78 | 6.78 | 6.67 | 6.76 | 6.84 | 0.17 | 100 | 2.98E−04 | −1.67 | 3.2 |
| 13230 | | | | | | | | | | |
| hsa-asg- | 6.74 | 6.97 | 5.90 | 6.60 | 6.84 | 0.58 | 100 | 1.10E−02 | −1.69 | 3.2 |
| 12902 | | | | | | | | | | |
| hsa-asg- | 6.50 | 7.57 | 6.95 | 7.53 | 7.17 | 0.39 | 100 | 2.48E−03 | −1.71 | 3.3 |
| 13237 | | | | | | | | | | |
| hsa-asg- | 6.01 | 7.72 | 7.23 | 7.51 | 7.13 | 0.85 | 86 | 2.80E−02 | −1.75 | 3.4 |
| 4002 | | | | | | | | | | |
| hsa-asg-21 | 4.64 | 6.59 | 6.30 | 6.40 | 6.05 | 0.75 | 86 | 3.18E−02 | −1.77 | 3.4 |
| hsa-asg- | 6.80 | 7.78 | 7.50 | 7.81 | 7.62 | 0.48 | 86 | 2.61E−03 | −1.79 | 3.5 |
| 10149 | | | | | | | | | | |
| hsa-asg- | 7.20 | 7.17 | 6.77 | 6.40 | 6.97 | 0.53 | 100 | 2.85E−02 | −1.83 | 3.6 |
| 5303 | | | | | | | | | | |
| hsa-asg- | 4.64 | 6.80 | 5.76 | 6.43 | 6.24 | 0.83 | 71 | 4.84E−02 | −1.84 | 3.6 |
| 10666 | | | | | | | | | | |
| hsa-asg-335 | 6.22 | 8.78 | 7.94 | 8.01 | 7.82 | 1.01 | 100 | 4.11E−02 | −1.88 | 3.7 |
| hsa-asg- | 5.40 | 7.00 | 6.32 | 6.33 | 6.21 | 0.61 | 29 | 3.93E−03 | −1.98 | 3.9 |
| 6250 | | | | | | | | | | |
| hsa-asg- | 4.84 | 6.07 | 5.90 | 7.15 | 6.08 | 0.78 | 29 | 1.18E−02 | −1.98 | 4.0 |
| 8208 | | | | | | | | | | |
| hsa-asg- | 6.14 | 8.68 | 8.01 | 8.23 | 7.78 | 1.09 | 100 | 4.01E−02 | −2.04 | 4.1 |
| 10387 | | | | | | | | | | |
| hsa-asg- | 9.18 | 8.89 | 8.86 | 10.09 | 9.20 | 0.58 | 100 | 1.86E−03 | −2.09 | 4.2 |
| 13248 | | | | | | | | | | |
| hsa-asg- | 4.58 | 6.46 | 6.44 | 5.31 | 5.67 | 0.87 | 71 | 2.27E−02 | −2.12 | 4.4 |
| 12079 | | | | | | | | | | |
| hsa-asg- | 7.60 | 8.20 | 7.32 | 7.98 | 7.57 | 0.40 | 100 | 5.68E−04 | −2.13 | 4.4 |
| 4557 | | | | | | | | | | |
| hsa-asg- | 8.05 | 8.75 | 8.88 | 9.64 | 8.92 | 0.62 | 100 | 1.81E−02 | −2.17 | 4.5 |
| 13937 | | | | | | | | | | |
| hsa-miR165 | 6.70 | 5.83 | 5.14 | 5.80 | 5.55 | 0.63 | 14 | 7.52E−03 | −2.18 | 4.5 |
| hsa-asg- | 5.81 | 6.86 | 6.68 | 7.27 | 6.65 | 0.96 | 86 | 1.84E−02 | −2.24 | 4.7 |
| 8682 | | | | | | | | | | |
| hsa-asg- | 4.73 | 6.11 | 5.83 | 5.74 | 5.71 | 0.61 | 29 | 4.97E−03 | −2.27 | 4.8 |
| 6413 | | | | | | | | | | |
| hsa-asg- | 6.29 | 6.82 | 6.28 | 7.15 | 6.60 | 0.42 | 86 | 1.45E−03 | −2.29 | 4.9 |
| 13304 | | | | | | | | | | |
| hsa-asg- | 4.46 | 6.75 | 6.28 | 6.63 | 5.93 | 1.04 | 71 | 3.02E−02 | −2.29 | 4.9 |
| 4205 | | | | | | | | | | |
| hsa-asg-870 | 5.18 | 6.42 | 6.05 | 6.50 | 6.12 | 1.05 | 43 | 1.74E−02 | −2.44 | 5.4 |
| hsa-asg- | 9.80 | 10.34 | 10.32 | 10.76 | 10.27 | 0.34 | 100 | 1.37E−03 | −2.46 | 5.5 |
| 7074 | | | | | | | | | | |
| hsa-asg- | 7.36 | 7.25 | 6.90 | 7.66 | 7.42 | 0.37 | 100 | 9.08E−03 | −2.48 | 5.6 |
| 13279 | | | | | | | | | | |
| hsa-asg- | 2.95 | 3.48 | 3.59 | 3.49 | 3.56 | 0.77 | 0 | 2.06E−05 | 6.71 | 104.3 |
| 5638 | | | | | | | | | | |
| hsa-asg- | 3.70 | 4.47 | 3.68 | 4.15 | 3.96 | 0.36 | 0 | 1.13E−04 | 4.34 | 20.3 |
| 11338 | | | | | | | | | | |
| hsa-asg- | 3.70 | 2.91 | 4.51 | 3.49 | 4.04 | 1.22 | 14 | 6.21E−03 | 4.10 | 17.2 |
| 5630 | | | | | | | | | | |
| hsa-asg- | 2.81 | 2.78 | 2.63 | 2.47 | 2.82 | 0.34 | 0 | 1.66E−03 | 2.91 | 7.5 |
| 13997 | | | | | | | | | | |
| hsa-asg- | 3.27 | 3.68 | 2.28 | 2.72 | 2.97 | 0.44 | 0 | 1.45E−03 | 2.77 | 6.8 |
| 8428 | | | | | | | | | | |
| hsa-asg- | 5.21 | 5.12 | 5.06 | 5.21 | 5.18 | 0.53 | 0 | 3.29E−04 | 2.64 | 6.2 |
| 9186 | | | | | | | | | | |
| hsa-asg- | 3.23 | 2.91 | 3.19 | 2.97 | 3.01 | 0.22 | 0 | 5.93E−04 | 2.57 | 5.9 |
| 1296 | | | | | | | | | | |
| hsa-asg- | 2.52 | 3.15 | 2.98 | 2.81 | 2.87 | 0.34 | 0 | 5.24E−05 | 2.52 | 5.7 |
| 9723 | | | | | | | | | | |
| hsa-asg- | 3.09 | 3.37 | 3.30 | 2.81 | 3.09 | 0.34 | 0 | 1.05E−03 | 2.23 | 4.7 |
| 11380 | | | | | | | | | | |
| hsa-asg- | 3.14 | 3.09 | 3.19 | 4.00 | 3.29 | 0.33 | 0 | 2.75E−03 | 2.10 | 4.3 |
| 2261 | | | | | | | | | | |
| hsa-asg- | 6.03 | 7.32 | 6.38 | 5.77 | 6.48 | 0.67 | 100 | 6.21E−03 | 2.10 | 4.3 |
| 1519 | | | | | | | | | | |
| hsa-asg- | 3.18 | 3.37 | 2.40 | 2.30 | 3.08 | 0.62 | 0 | 7.11E−03 | 2.09 | 4.3 |
| 1794 | | | | | | | | | | |
| hsa-asg- | 4.32 | 4.17 | 4.90 | 4.97 | 4.55 | 0.29 | 0 | 9.72E−05 | 2.03 | 4.1 |
| 12271 | | | | | | | | | | |
| hsa-asg- | 4.21 | 3.98 | 5.14 | 5.46 | 4.38 | 0.67 | 0 | 1.68E−02 | 2.03 | 4.1 |
| 14208 | | | | | | | | | | |
| hsa-asg- | 4.29 | 4.25 | 3.49 | 3.86 | 3.78 | 0.40 | 0 | 1.35E−02 | 1.93 | 3.8 |
| 8486 | | | | | | | | | | |
| hsa-asg- | 8.38 | 8.23 | 8.84 | 9.13 | 8.70 | 0.44 | 14 | 7.16E−04 | 1.90 | 3.7 |
| 5640 | | | | | | | | | | |
| hsa-cand317 | 3.88 | 3.48 | 4.61 | 4.91 | 3.90 | 0.74 | 14 | 4.34E−02 | 1.71 | 3.3 |
| hsa-asg- | 3.52 | 3.15 | 2.63 | 3.56 | 3.32 | 0.41 | 0 | 2.08E−03 | 1.71 | 3.3 |
| 2335 | | | | | | | | | | |
| hsa-asg- | 2.22 | 3.03 | 3.09 | 2.81 | 2.96 | 0.37 | 0 | 1.77E−02 | 1.70 | 3.3 |
| 1587 | | | | | | | | | | |
| hsa-asg- | 4.09 | 5.41 | 2.86 | 5.11 | 4.34 | 0.86 | 0 | 4.25E−02 | 1.63 | 3.1 |
| 4803 | | | | | | | | | | |
| hsa-asg- | 9.37 | 8.64 | 9.11 | 10.21 | 9.28 | 0.60 | 43 | 9.15E−03 | 1.59 | 3.0 |
| 13278 | | | | | | | | | | |
| hsa-asg-497 | 5.64 | 6.69 | 5.31 | 5.62 | 5.78 | 0.43 | 57 | 2.03E−03 | 1.55 | 2.9 |
| hsa-asg- | 4.15 | 4.47 | 3.09 | 5.08 | 4.16 | 0.81 | 0 | 4.31E−02 | 1.52 | 2.9 |
| 9796 | | | | | | | | | | |
| hsa-asg- | 3.48 | 4.14 | 3.49 | 4.89 | 3.97 | 0.60 | 0 | 3.98E−02 | 1.50 | 2.8 |
| 10031 | | | | | | | | | | |
| hsa-asg- | 4.73 | 3.90 | 4.07 | 4.83 | 4.28 | 0.41 | 0 | 2.10E−03 | 1.50 | 2.8 |
| 9980 | | | | | | | | | | |
| hsa-asg- | 4.51 | 4.53 | 4.07 | 4.79 | 4.42 | 0.23 | 0 | 1.29E−02 | 1.49 | 2.8 |
| 12453 | | | | | | | | | | |
| hsa-asg- | 5.52 | 5.81 | 5.28 | 4.81 | 5.25 | 0.38 | 0 | 2.53E−02 | 1.46 | 2.7 |
| 11489 | | | | | | | | | | |
| hsa-asg- | 3.81 | 3.48 | 3.49 | 3.28 | 3.36 | 0.28 | 0 | 2.61E−04 | 1.45 | 2.7 |
| 11361 | | | | | | | | | | |
| hsa-asg- | 6.29 | 5.45 | 6.12 | 5.04 | 5.49 | 0.52 | 29 | 8.72E−03 | 1.43 | 2.7 |
| 12807 | | | | | | | | | | |
| hsa-asg- | 6.14 | 4.31 | 5.14 | 4.71 | 4.92 | 0.59 | 14 | 1.76E−02 | 1.38 | 2.6 |
| 7511 | | | | | | | | | | |
| hsa-asg- | 4.82 | 4.44 | 4.33 | 4.67 | 4.72 | 0.26 | 0 | 1.41E−02 | 1.35 | 2.5 |
| 9762 | | | | | | | | | | |
| hsa-asg- | 6.82 | 6.39 | 5.78 | 6.93 | 6.40 | 0.52 | 0 | 1.63E−02 | 1.29 | 2.4 |
| 12372 | | | | | | | | | | |
| hsa-asg- | 7.73 | 7.15 | 7.34 | 8.45 | 7.66 | 0.64 | 43 | 3.47E−02 | 1.29 | 2.4 |
| 4223 | | | | | | | | | | |
| hsa-asg- | 5.93 | 5.01 | 4.71 | 5.08 | 5.41 | 0.48 | 43 | 1.60E−02 | 1.24 | 2.4 |
| 11402 | | | | | | | | | | |
| hsa-asg- | 6.60 | 6.15 | 5.96 | 6.66 | 6.38 | 0.25 | 71 | 4.50E−04 | 1.24 | 2.4 |
| 8633 | | | | | | | | | | |
| hsa-asg- | 5.05 | 6.19 | 5.61 | 5.74 | 5.71 | 0.44 | 0 | 1.11E−02 | 1.21 | 2.3 |
| 4780 | | | | | | | | | | |
| hsa-asg- | 6.41 | 5.66 | 6.18 | 5.47 | 5.83 | 0.35 | 0 | 3.21E−03 | 1.15 | 2.2 |
| 9117 | | | | | | | | | | |
| hsa-asg- | 4.62 | 5.36 | 4.71 | 4.44 | 4.60 | 0.44 | 14 | 1.97E−02 | 1.14 | 2.2 |
| 1362 | | | | | | | | | | |
| hsa-asg- | 9.36 | 9.85 | 9.37 | 9.86 | 9.44 | 0.42 | 100 | 9.27E−03 | 1.13 | 2.2 |
| 14233 | | | | | | | | | | |
| hsa-asg- | 12.13 | 11.26 | 11.31 | 11.44 | 11.70 | 0.45 | 100 | 1.89E−02 | 1.10 | 2.1 |
| 13309 | | | | | | | | | | |
| hsa-asg- | 7.28 | 6.38 | 5.94 | 6.86 | 6.65 | 0.42 | 71 | 3.49E−02 | 1.10 | 2.1 |
| 13841 | | | | | | | | | | |
| hsa-asg- | 6.27 | 7.18 | 6.38 | 5.73 | 6.23 | 0.48 | 43 | 1.83E−02 | 1.10 | 2.1 |
| 14001 | | | | | | | | | | |
| hsa-asg- | 3.97 | 4.47 | 5.17 | 4.00 | 4.59 | 0.49 | 0 | 2.24E−02 | 1.06 | 2.1 |
| 12320 | | | | | | | | | | |
| hsa-asg- | 6.47 | 6.61 | 6.00 | 7.06 | 6.55 | 0.33 | 100 | 1.63E−02 | 1.05 | 2.1 |
| 9227 | | | | | | | | | | |
| hsa-asg- | 5.79 | 6.11 | 6.05 | 6.36 | 6.12 | 0.21 | 43 | 4.61E−04 | 1.04 | 2.1 |
| 7922 | | | | | | | | | | |
| hsa-asg- | 8.69 | 8.11 | 8.21 | 8.21 | 8.25 | 0.29 | 100 | 2.10E−03 | 1.02 | 2.0 |
| 9261 | | | | | | | | | | |
| hsa-cand732 | 7.38 | 6.50 | 6.81 | 7.13 | 6.80 | 0.39 | 57 | 1.66E−02 | 1.02 | 2.0 |
| hsa-asg- | 5.18 | 5.18 | 4.94 | 4.81 | 5.03 | 0.21 | 0 | 3.23E−04 | 1.02 | 2.0 |
| 13924 | | | | | | | | | | |
| hsa-asg- | 4.64 | 4.10 | 4.14 | 5.59 | 4.63 | 0.55 | 0 | 4.52E−02 | 1.02 | 2.0 |
| 2889 | | | | | | | | | | |
| hsa-asg- | 6.53 | 6.15 | 5.83 | 6.42 | 6.10 | 0.30 | 29 | 5.93E−03 | 1.02 | 2.0 |
| 12381 | | | | | | | | | | |
| hsa-asg- | 6.98 | 6.39 | 7.03 | 5.92 | 6.54 | 0.39 | 86 | 1.15E−02 | 1.02 | 2.0 |
| 8003 | | | | | | | | | | |
| hsa-asg- | 5.08 | 5.08 | 5.31 | 5.34 | 5.06 | 0.26 | 0 | 6.75E−03 | 1.01 | 2.0 |
| 7262 | | | | | | | | | | |
| hsa-asg- | 10.26 | 10.37 | 9.46 | 10.36 | 10.02 | 0.35 | 100 | 4.04E−02 | 0.99 | 2.0 |
| 11850 | | | | | | | | | | |
| hsa-asg- | 6.01 | 5.27 | 5.81 | 5.74 | 5.76 | 0.24 | 0 | 1.22E−03 | 0.98 | 2.0 |
| 7027 | | | | | | | | | | |
| hsa-asg- | 7.96 | 7.77 | 7.71 | 8.37 | 7.87 | 0.30 | 71 | 6.10E−03 | 0.97 | 2.0 |
| 12937 | | | | | | | | | | |
| hsa-asg-345 | 4.58 | 4.44 | 4.76 | 4.56 | 4.71 | 0.19 | 0 | 3.29E−04 | 0.97 | 2.0 |
| hsa-asg- | 5.46 | 5.40 | 4.98 | 5.11 | 5.42 | 0.44 | 43 | 2.66E−02 | 0.96 | 1.9 |
| 4969 | | | | | | | | | | |
| hsa-asg- | 5.65 | 5.73 | 4.98 | 5.26 | 5.44 | 0.30 | 0 | 1.79E−02 | 0.96 | 1.9 |
| 3798 | | | | | | | | | | |
| hsa-asg- | 6.56 | 6.00 | 6.94 | 5.95 | 6.20 | 0.40 | 43 | 1.88E−02 | 0.95 | 1.9 |
| 4703 | | | | | | | | | | |
| hsa-asg- | 3.14 | 3.32 | 3.30 | 3.46 | 3.12 | 0.45 | 0 | 4.96E−02 | 0.95 | 1.9 |
| 8792 | | | | | | | | | | |
| hsa-asg- | 5.35 | 4.97 | 5.06 | 4.60 | 5.05 | 0.38 | 0 | 1.27E−02 | 0.94 | 1.9 |
| 4460 | | | | | | | | | | |
| hsa-asg- | 7.24 | 7.11 | 6.96 | 7.43 | 7.12 | 0.29 | 0 | 5.18E−03 | 0.94 | 1.9 |
| 4026 | | | | | | | | | | |
| hsa-cand421 | 10.62 | 10.83 | 10.39 | 10.88 | 10.62 | 0.26 | 100 | 1.61E−02 | 0.93 | 1.9 |
| hsa-asg- | 7.79 | 7.34 | 7.21 | 7.93 | 7.59 | 0.41 | 100 | 1.88E−02 | 0.93 | 1.9 |
| 3670 | | | | | | | | | | |
| hsa-asg- | 7.49 | 7.14 | 7.29 | 7.16 | 7.22 | 0.16 | 100 | 1.22E−03 | 0.88 | 1.8 |
| 9130 | | | | | | | | | | |
| hsa-asg- | 5.40 | 5.54 | 5.28 | 4.95 | 5.43 | 0.28 | 29 | 4.00E−02 | 0.88 | 1.8 |
| 7783 | | | | | | | | | | |
| hsa-asg- | 5.22 | 5.81 | 5.02 | 4.94 | 5.27 | 0.39 | 43 | 3.35E−02 | 0.86 | 1.8 |
| 3944 | | | | | | | | | | |
| hsa-asg- | 5.00 | 5.40 | 4.94 | 4.60 | 4.93 | 0.30 | 0 | 6.39E−03 | 0.86 | 1.8 |
| 13798 | | | | | | | | | | |
| hsa-asg- | 8.33 | 8.04 | 8.15 | 8.43 | 8.11 | 0.31 | 100 | 8.28E−03 | 0.86 | 1.8 |
| 6870 | | | | | | | | | | |
| hsa-asg- | 4.93 | 5.14 | 5.37 | 4.67 | 4.85 | 0.37 | 14 | 2.70E−02 | 0.85 | 1.8 |
| 2460 | | | | | | | | | | |
| hsa-asg- | 4.18 | 4.17 | 4.21 | 4.81 | 4.43 | 0.28 | 14 | 3.48E−02 | 0.84 | 1.8 |
| 11267 | | | | | | | | | | |
| hsa-asg- | 5.49 | 6.08 | 5.31 | 5.38 | 5.46 | 0.29 | 43 | 8.12E−03 | 0.83 | 1.8 |
| 3604 | | | | | | | | | | |
| hsa-asg- | 5.86 | 6.47 | 6.47 | 5.82 | 6.05 | 0.30 | 43 | 9.81E−03 | 0.80 | 1.7 |
| 4296 | | | | | | | | | | |
| hsa-asg- | 8.80 | 8.21 | 7.77 | 8.07 | 8.19 | 0.35 | 100 | 4.51E−02 | 0.76 | 1.7 |
| 8866 | | | | | | | | | | |
| hsa-asg- | 4.97 | 5.14 | 4.56 | 4.81 | 4.88 | 0.21 | 100 | 5.92E−03 | 0.73 | 1.7 |
| 12471 | | | | | | | | | | |
| hsa-asg- | 7.39 | 7.30 | 7.70 | 7.93 | 7.49 | 0.31 | 100 | 3.18E−02 | 0.72 | 1.7 |
| 11515 | | | | | | | | | | |
| hsa-asg- | 5.59 | 6.03 | 5.92 | 5.52 | 5.80 | 0.26 | 71 | 1.70E−02 | 0.71 | 1.6 |
| 7252 | | | | | | | | | | |
| hsa-asg- | 6.02 | 5.16 | 5.83 | 5.67 | 5.82 | 0.38 | 57 | 4.23E−02 | 0.70 | 1.6 |
| 11458 | | | | | | | | | | |
| hsa-asg- | 9.03 | 8.98 | 8.45 | 8.74 | 8.71 | 0.28 | 0 | 1.98E−02 | 0.69 | 1.6 |
| 13453 | | | | | | | | | | |
| hsa-asg- | 9.58 | 9.30 | 9.81 | 9.23 | 9.35 | 0.25 | 100 | 9.03E−03 | 0.68 | 1.6 |
| 3722 | | | | | | | | | | |
| hsa-asg- | 10.93 | 10.94 | 10.45 | 11.11 | 10.84 | 0.20 | 100 | 3.58E−02 | 0.67 | 1.6 |
| 3992 | | | | | | | | | | |
| hsa-asg- | 6.49 | 6.57 | 5.96 | 6.12 | 6.34 | 0.23 | 14 | 1.39E−02 | 0.66 | 1.6 |
| 4373 | | | | | | | | | | |
| hsa-asg- | 7.22 | 7.00 | 6.92 | 7.50 | 7.08 | 0.21 | 100 | 4.17E−03 | 0.66 | 1.6 |
| 9480 | | | | | | | | | | |
| hsa-asg- | 12.68 | 12.56 | 12.44 | 12.69 | 12.59 | 0.12 | 100 | 9.16E−03 | 0.65 | 1.6 |
| 7939 | | | | | | | | | | |
| hsa-asg- | 5.69 | 6.54 | 6.30 | 6.25 | 6.22 | 0.28 | 100 | 1.86E−02 | 0.64 | 1.6 |
| 4448 | | | | | | | | | | |
| hsa-asg- | 6.42 | 5.81 | 5.94 | 6.19 | 6.20 | 0.26 | 71 | 2.18E−02 | 0.64 | 1.6 |
| 1338 | | | | | | | | | | |
| hsa-asg- | 8.09 | 7.62 | 7.25 | 7.70 | 7.53 | 0.30 | 100 | 2.54E−02 | 0.63 | 1.5 |
| 11617 | | | | | | | | | | |
| hsa-asg-954 | 9.66 | 9.68 | 9.05 | 9.09 | 9.31 | 0.26 | 100 | 1.62E−02 | 0.62 | 1.5 |
| hsa-asg- | 5.85 | 6.15 | 5.63 | 6.58 | 6.01 | 0.33 | 86 | 4.50E−02 | 0.62 | 1.5 |
| 2381 | | | | | | | | | | |
| hsa-asg- | 4.98 | 5.45 | 5.34 | 5.39 | 5.35 | 0.30 | 14 | 2.72E−02 | 0.62 | 1.5 |
| 2697 | | | | | | | | | | |
| hsa-asg- | 5.35 | 5.75 | 5.83 | 5.70 | 5.66 | 0.18 | 0 | 3.79E−03 | 0.59 | 1.5 |
| 2365 | | | | | | | | | | |
| hsa-asg- | 5.21 | 5.20 | 5.21 | 4.89 | 5.09 | 0.12 | 0 | 7.55E−03 | 0.59 | 1.5 |
| 9795 | | | | | | | | | | |
| hsa-asg- | 5.25 | 5.22 | 4.90 | 5.21 | 4.94 | 0.30 | 14 | 4.64E−02 | 0.59 | 1.5 |
| 12457 | | | | | | | | | | |
| hsa-asg- | 6.02 | 6.21 | 5.47 | 5.40 | 5.77 | 0.31 | 14 | 3.91E−02 | 0.58 | 1.5 |
| 2500 | | | | | | | | | | |
| hsa-asg- | 6.84 | 6.79 | 6.76 | 6.83 | 6.84 | 0.12 | 100 | 3.51E−02 | 0.56 | 1.5 |
| 8882 | | | | | | | | | | |
| hsa-asg- | 5.65 | 5.64 | 5.34 | 5.42 | 5.37 | 0.22 | 57 | 1.38E−02 | 0.55 | 1.5 |
| 5973 | | | | | | | | | | |
| hsa-asg- | 5.82 | 6.23 | 5.96 | 5.99 | 6.07 | 0.26 | 86 | 3.62E−02 | 0.54 | 1.5 |
| 6616 | | | | | | | | | | |
| hsa-asg- | 6.47 | 6.12 | 6.14 | 6.22 | 6.29 | 0.14 | 86 | 2.95E−03 | 0.53 | 1.4 |
| 13294 | | | | | | | | | | |
| hsa-asg- | 5.16 | 4.92 | 5.14 | 5.19 | 4.96 | 0.29 | 57 | 4.22E−02 | 0.53 | 1.4 |
| 9521 | | | | | | | | | | |
| hsa-asg- | 8.92 | 8.46 | 8.57 | 8.69 | 8.56 | 0.21 | 100 | 1.63E−02 | 0.52 | 1.4 |
| 7450 | | | | | | | | | | |
| hsa-asg- | 4.39 | 5.01 | 4.61 | 4.40 | 4.53 | 0.23 | 14 | 2.83E−02 | 0.51 | 1.4 |
| 4030 | | | | | | | | | | |
| hsa-asg- | 7.43 | 6.96 | 6.86 | 6.90 | 6.98 | 0.25 | 100 | 4.49E−02 | 0.50 | 1.4 |
| 12406 | | | | | | | | | | |
| hsa-asg- | 5.65 | 5.46 | 5.52 | 5.53 | 5.64 | 0.15 | 57 | 4.11E−03 | 0.48 | 1.4 |
| 12885 | | | | | | | | | | |
| hsa-cand873 | 5.54 | 5.88 | 5.47 | 5.33 | 5.42 | 0.26 | 43 | 4.38E−02 | 0.48 | 1.4 |
| hsa-asg- | 13.31 | 13.25 | 13.23 | 13.29 | 13.30 | 0.06 | 100 | 6.79E−03 | 0.47 | 1.4 |
| 14201 | | | | | | | | | | |
| hsa-asg- | 10.47 | 10.19 | 10.43 | 10.26 | 10.32 | 0.18 | 100 | 4.15E−02 | 0.46 | 1.4 |
| 8568 | | | | | | | | | | |
| hsa-asg- | 8.01 | 7.49 | 7.88 | 7.61 | 7.68 | 0.19 | 57 | 3.96E−02 | 0.45 | 1.4 |
| 3239 | | | | | | | | | | |
| hsa-asg- | 7.39 | 7.25 | 7.18 | 7.03 | 7.17 | 0.13 | 100 | 2.58E−03 | 0.45 | 1.4 |
| 4984 | | | | | | | | | | |
| hsa-asg- | 5.77 | 5.99 | 5.71 | 5.62 | 5.79 | 0.15 | 57 | 7.62E−03 | 0.44 | 1.4 |
| 2093 | | | | | | | | | | |
| | 5.95 | 6.06 | 5.92 | 5.70 | 5.96 | 0.18 | 100 | 1.61E−02 | 0.43 | 1.3 |
| hsa-asg-733 | | | | | | | | | | |
| hsa-asg-89 | 6.20 | 6.37 | 6.20 | 5.86 | 6.15 | 0.17 | 100 | 1.60E−02 | 0.40 | 1.3 |
| hsa-asg- | 5.80 | 5.83 | 5.74 | 5.49 | 5.73 | 0.15 | 100 | 1.12E−02 | 0.39 | 1.3 |
| 12816 | | | | | | | | | | |
| hsa-asg- | 5.21 | 5.49 | 5.44 | 5.44 | 5.45 | 0.18 | 0 | 2.11E−02 | 0.39 | 1.3 |
| 11057 | | | | | | | | | | |
| hsa-asg- | 6.34 | 6.35 | 6.08 | 6.07 | 6.20 | 0.12 | 100 | 9.20E−03 | 0.36 | 1.3 |
| 6305 | | | | | | | | | | |
| hsa-asg- | 5.52 | 5.64 | 5.58 | 5.33 | 5.59 | 0.19 | 14 | 3.93E−02 | 0.36 | 1.3 |
| 4587 | | | | | | | | | | |
| hsa-asg- | 6.02 | 5.83 | 5.96 | 5.84 | 5.92 | 0.08 | 100 | 4.34E−02 | 0.16 | 1.1 |
| 2483 | | | | | | | | | | |
| hsa-asg-758 | 6.66 | 6.55 | 6.28 | 6.54 | 6.51 | 0.16 | 100 | 4.22E−02 | −0.29 | 1.2 |
| hsa-asg- | 6.55 | 6.54 | 6.75 | 6.65 | 6.61 | 0.14 | 100 | 2.89E−02 | −0.30 | 1.2 |
| 7410 | | | | | | | | | | |
| hsa-asg- | 10.56 | 10.07 | 10.35 | 10.32 | 10.30 | 0.16 | 100 | 3.48E−02 | −0.33 | 1.3 |
| 2899 | | | | | | | | | | |
| hsa-asg- | 9.43 | 9.22 | 9.31 | 9.60 | 9.33 | 0.17 | 29 | 4.56E−02 | −0.35 | 1.3 |
| 7628 | | | | | | | | | | |
| hsa-asg- | 10.85 | 10.63 | 10.84 | 10.82 | 10.77 | 0.15 | 100 | 1.74E−02 | −0.35 | 1.3 |
| 14034 | | | | | | | | | | |
| hsa-asg- | 10.07 | 9.70 | 10.10 | 10.17 | 9.91 | 0.20 | 100 | 4.83E−02 | −0.37 | 1.3 |
| 8253 | | | | | | | | | | |
| hsa-asg- | 4.97 | 5.14 | 4.90 | 4.97 | 4.95 | 0.17 | 14 | 2.20E−02 | −0.38 | 1.3 |
| 4426 | | | | | | | | | | |
| hsa-asg- | 7.04 | 6.74 | 6.66 | 6.77 | 6.75 | 0.16 | 100 | 3.73E−02 | −0.38 | 1.3 |
| 8655 | | | | | | | | | | |
| hsa-asg- | 11.69 | 11.27 | 11.38 | 11.58 | 11.45 | 0.15 | 100 | 1.44E−02 | −0.39 | 1.3 |
| 10632 | | | | | | | | | | |
| hsa-asg-974 | 6.87 | 6.87 | 6.86 | 7.24 | 6.99 | 0.22 | 100 | 4.65E−02 | −0.39 | 1.3 |
| hsa-asg- | 6.59 | 6.29 | 6.27 | 6.81 | 6.48 | 0.20 | 29 | 3.65E−02 | −0.39 | 1.3 |
| 7218 | | | | | | | | | | |
| hsa-asg-206 | 9.93 | 9.51 | 9.64 | 9.98 | 9.76 | 0.16 | 100 | 3.84E−02 | −0.40 | 1.3 |
| hsa-asg- | 8.12 | 7.98 | 7.84 | 7.71 | 7.88 | 0.21 | 100 | 3.39E−02 | −0.41 | 1.3 |
| 3565 | | | | | | | | | | |
| hsa-cand559 | 7.23 | 7.44 | 7.52 | 7.40 | 7.39 | 0.19 | 100 | 2.71E−02 | −0.41 | 1.3 |
| hsa-asg- | 8.43 | 8.28 | 8.16 | 8.65 | 8.40 | 0.23 | 100 | 4.36E−02 | −0.42 | 1.3 |
| 1809 | | | | | | | | | | |
| hsa-asg- | 9.02 | 8.49 | 8.85 | 8.86 | 8.74 | 0.18 | 100 | 1.81E−02 | −0.42 | 1.3 |
| 4020 | | | | | | | | | | |
| hsa-asg- | 8.42 | 8.16 | 8.21 | 8.48 | 8.27 | 0.17 | 100 | 1.56E−02 | −0.42 | 1.3 |
| 10392 | | | | | | | | | | |
| hsa-asg- | 6.63 | 6.35 | 6.50 | 6.82 | 6.53 | 0.17 | 43 | 1.43E−02 | −0.42 | 1.3 |
| 9501 | | | | | | | | | | |
| hsa-asg-976 | 6.74 | 6.94 | 6.41 | 6.63 | 6.65 | 0.23 | 100 | 4.09E−02 | −0.43 | 1.3 |
| hsa-asg- | 10.13 | 9.79 | 9.88 | 9.88 | 9.92 | 0.11 | 100 | 1.15E−02 | −0.43 | 1.3 |
| 5749 | | | | | | | | | | |
| hsa-asg- | 9.42 | 9.34 | 9.11 | 9.38 | 9.28 | 0.15 | 100 | 1.85E−02 | −0.43 | 1.4 |
| 8631 | | | | | | | | | | |
| hsa-asg- | 9.57 | 9.28 | 9.24 | 9.59 | 9.34 | 0.17 | 14 | 1.23E−02 | −0.44 | 1.4 |
| 7051 | | | | | | | | | | |
| hsa-asg- | 6.02 | 6.00 | 6.23 | 6.30 | 6.08 | 0.17 | 57 | 4.92E−02 | −0.45 | 1.4 |
| 10506 | | | | | | | | | | |
| hsa-asg-507 | 3.27 | 2.78 | 3.19 | 3.28 | 3.05 | 0.21 | 0 | 2.51E−02 | −0.45 | 1.4 |
| hsa-asg- | 8.67 | 8.16 | 8.33 | 8.40 | 8.26 | 0.23 | 100 | 3.98E−02 | −0.45 | 1.4 |
| 6018 | | | | | | | | | | |
| hsa-asg- | 9.72 | 9.42 | 9.46 | 9.83 | 9.57 | 0.18 | 57 | 1.33E−02 | −0.46 | 1.4 |
| 3240 | | | | | | | | | | |
| hsa-asg-504 | 9.05 | 8.87 | 8.78 | 8.93 | 8.86 | 0.13 | 100 | 3.83E−03 | −0.46 | 1.4 |
| hsa-cand110 | 11.04 | 10.68 | 10.64 | 10.96 | 10.78 | 0.16 | 100 | 6.77E−03 | −0.46 | 1.4 |
| hsa-asg- | 11.62 | 11.80 | 11.12 | 11.86 | 11.54 | 0.25 | 100 | 4.83E−02 | −0.46 | 1.4 |
| 3811 | | | | | | | | | | |
| hsa-asg- | 11.11 | 10.76 | 11.19 | 10.96 | 10.95 | 0.17 | 100 | 2.69E−02 | −0.46 | 1.4 |
| 6398 | | | | | | | | | | |
| hsa-asg- | 10.13 | 9.69 | 9.96 | 10.03 | 9.91 | 0.17 | 100 | 1.04E−02 | −0.47 | 1.4 |
| 4731 | | | | | | | | | | |
| hsa-asg- | 10.72 | 10.41 | 10.61 | 10.73 | 10.55 | 0.18 | 100 | 1.28E−02 | −0.47 | 1.4 |
| 7096 | | | | | | | | | | |
| hsa-asg- | 9.63 | 9.31 | 9.41 | 9.41 | 9.34 | 0.18 | 100 | 9.17E−03 | −0.48 | 1.4 |
| 6367 | | | | | | | | | | |
| hsa-asg- | 9.86 | 9.46 | 9.58 | 9.94 | 9.62 | 0.22 | 86 | 3.31E−02 | −0.48 | 1.4 |
| 3456 | | | | | | | | | | |
| hsa-asg- | 7.00 | 6.75 | 6.70 | 6.84 | 6.73 | 0.21 | 100 | 1.84E−02 | −0.49 | 1.4 |
| 1641 | | | | | | | | | | |
| hsa-asg- | 10.38 | 9.87 | 10.29 | 10.21 | 10.11 | 0.21 | 100 | 2.78E−02 | −0.49 | 1.4 |
| 2980 | | | | | | | | | | |
| hsa-asg- | 9.10 | 8.69 | 8.59 | 8.97 | 8.83 | 0.19 | 100 | 2.43E−02 | −0.49 | 1.4 |
| 4828 | | | | | | | | | | |
| hsa-asg- | 9.49 | 9.23 | 9.02 | 9.46 | 9.28 | 0.18 | 100 | 8.39E−03 | −0.50 | 1.4 |
| 9266 | | | | | | | | | | |
| hsa-asg- | 11.05 | 10.69 | 10.91 | 10.90 | 10.82 | 0.14 | 100 | 2.61E−03 | −0.50 | 1.4 |
| 3260 | | | | | | | | | | |
| hsa-asg- | 8.46 | 8.25 | 8.00 | 8.43 | 8.22 | 0.21 | 100 | 1.97E−02 | −0.50 | 1.4 |
| 6802 | | | | | | | | | | |
| hsa-asg- | 5.59 | 6.00 | 6.20 | 6.35 | 5.99 | 0.27 | 29 | 4.20E−02 | −0.51 | 1.4 |
| 7579 | | | | | | | | | | |
| hsa-asg- | 4.09 | 4.56 | 4.64 | 4.00 | 4.35 | 0.28 | 57 | 4.99E−02 | −0.51 | 1.4 |
| 12857 | | | | | | | | | | |
| hsa-asg- | 8.72 | 8.73 | 8.52 | 8.76 | 8.51 | 0.24 | 100 | 2.36E−02 | −0.51 | 1.4 |
| 8421 | | | | | | | | | | |
| hsa-cand583 | 6.19 | 6.06 | 5.90 | 5.74 | 5.94 | 0.22 | 29 | 2.82E−02 | −0.52 | 1.4 |
| hsa-asg- | 9.41 | 9.05 | 9.07 | 9.35 | 9.18 | 0.18 | 100 | 1.04E−02 | −0.52 | 1.4 |
| 1123 | | | | | | | | | | |
| hsa-asg- | 9.57 | 9.19 | 9.93 | 9.42 | 9.47 | 0.23 | 100 | 3.53E−02 | −0.52 | 1.4 |
| 11946 | | | | | | | | | | |
| hsa-asg- | 7.69 | 7.23 | 7.02 | 7.15 | 7.24 | 0.24 | 100 | 3.03E−02 | −0.52 | 1.4 |
| 12953 | | | | | | | | | | |
| hsa-asg- | 8.98 | 8.33 | 8.45 | 8.74 | 8.51 | 0.27 | 100 | 4.69E−02 | −0.52 | 1.4 |
| 10639 | | | | | | | | | | |
| hsa-asg- | 8.33 | 8.27 | 8.20 | 8.53 | 8.19 | 0.23 | 100 | 2.70E−02 | −0.53 | 1.4 |
| 3345 | | | | | | | | | | |
| hsa-asg- | 7.86 | 7.83 | 7.38 | 8.02 | 7.76 | 0.20 | 100 | 9.44E−03 | −0.53 | 1.4 |
| 3230 | | | | | | | | | | |
| hsa-cand441 | 7.87 | 7.60 | 7.33 | 7.86 | 7.58 | 0.26 | 29 | 4.16E−02 | −0.53 | 1.4 |
| hsa-asg- | 10.74 | 10.45 | 10.91 | 10.81 | 10.63 | 0.20 | 100 | 2.06E−02 | −0.53 | 1.4 |
| 3892 | | | | | | | | | | |
| hsa-asg- | 7.27 | 6.84 | 7.04 | 7.41 | 7.12 | 0.18 | 100 | 8.27E−03 | −0.53 | 1.4 |
| 7326 | | | | | | | | | | |
| hsa-asg- | 7.41 | 7.56 | 7.22 | 7.87 | 7.46 | 0.23 | 100 | 2.38E−02 | −0.54 | 1.5 |
| 1174 | | | | | | | | | | |
| hsa-asg- | 6.85 | 7.01 | 6.85 | 7.40 | 7.12 | 0.29 | 14 | 4.14E−02 | −0.54 | 1.5 |
| 3290 | | | | | | | | | | |
| hsa-asg- | 8.55 | 8.31 | 7.92 | 8.30 | 8.26 | 0.20 | 100 | 1.76E−02 | −0.55 | 1.5 |
| 12441 | | | | | | | | | | |
| hsa-asg- | 8.20 | 7.85 | 7.40 | 8.12 | 7.78 | 0.32 | 100 | 4.82E−02 | −0.56 | 1.5 |
| 4502 | | | | | | | | | | |
| hsa-asg- | 9.63 | 9.10 | 9.53 | 9.42 | 9.40 | 0.17 | 14 | 3.42E−03 | −0.56 | 1.5 |
| 11758 | | | | | | | | | | |
| hsa-asg- | 7.26 | 7.29 | 6.83 | 7.51 | 7.15 | 0.26 | 100 | 2.84E−02 | −0.57 | 1.5 |
| 4759 | | | | | | | | | | |
| hsa-asg- | 7.92 | 7.56 | 7.86 | 7.91 | 7.66 | 0.24 | 43 | 1.68E−02 | −0.57 | 1.5 |
| 3808 | | | | | | | | | | |
| hsa-asg- | 8.64 | 8.11 | 7.94 | 8.42 | 8.23 | 0.26 | 100 | 2.15E−02 | −0.57 | 1.5 |
| 11249 | | | | | | | | | | |
| hsa-asg- | 10.02 | 9.77 | 9.75 | 9.91 | 9.75 | 0.19 | 100 | 9.17E−03 | −0.58 | 1.5 |
| 6728 | | | | | | | | | | |
| hsa-asg- | 8.03 | 7.89 | 7.42 | 8.11 | 7.81 | 0.23 | 100 | 3.67E−02 | −0.58 | 1.5 |
| 2891 | | | | | | | | | | |
| hsa-asg- | 4.93 | 5.14 | 5.55 | 5.05 | 5.01 | 0.28 | 29 | 4.49E−02 | −0.58 | 1.5 |
| 14186 | | | | | | | | | | |
| hsa-cand735 | 8.20 | 7.89 | 8.31 | 8.15 | 8.06 | 0.16 | 100 | 1.68E−03 | −0.58 | 1.5 |
| hsa-asg- | 5.43 | 5.59 | 5.28 | 5.81 | 5.58 | 0.19 | 14 | 4.99E−03 | −0.58 | 1.5 |
| 8391 | | | | | | | | | | |
| hsa-asg- | 6.94 | 6.75 | 6.10 | 6.71 | 6.56 | 0.28 | 100 | 2.92E−02 | −0.58 | 1.5 |
| 1617 | | | | | | | | | | |
| hsa-asg- | 8.86 | 8.60 | 8.49 | 8.91 | 8.70 | 0.17 | 100 | 2.38E−03 | −0.59 | 1.5 |
| 2626 | | | | | | | | | | |
| hsa-asg- | 7.19 | 6.83 | 6.67 | 7.47 | 6.95 | 0.28 | 100 | 3.91E−02 | −0.59 | 1.5 |
| 11252 | | | | | | | | | | |
| hsa-asg- | 5.00 | 5.06 | 4.81 | 5.29 | 5.21 | 0.32 | 29 | 4.64E−02 | −0.59 | 1.5 |
| 11585 | | | | | | | | | | |
| hsa-asg- | 7.79 | 7.31 | 7.36 | 7.82 | 7.61 | 0.21 | 100 | 8.13E−03 | −0.59 | 1.5 |
| 10575 | | | | | | | | | | |
| hsa-asg- | 7.73 | 7.44 | 7.29 | 7.69 | 7.40 | 0.23 | 100 | 1.02E−02 | −0.59 | 1.5 |
| 14066 | | | | | | | | | | |
| hsa-asg- | 8.72 | 8.36 | 8.81 | 8.90 | 8.52 | 0.28 | 100 | 2.43E−02 | −0.60 | 1.5 |
| 11729 | | | | | | | | | | |
| hsa-asg- | 8.00 | 8.25 | 7.58 | 7.74 | 7.80 | 0.27 | 100 | 3.23E−02 | −0.60 | 1.5 |
| 11521 | | | | | | | | | | |
| hsa-asg- | 9.05 | 8.72 | 8.96 | 9.05 | 8.94 | 0.14 | 100 | 8.23E−03 | −0.61 | 1.5 |
| 12581 | | | | | | | | | | |
| hsa-asg- | 9.73 | 9.22 | 9.47 | 9.31 | 9.38 | 0.18 | 29 | 2.49E−03 | −0.61 | 1.5 |
| 13079 | | | | | | | | | | |
| hsa-asg- | 5.05 | 5.54 | 4.90 | 5.62 | 5.30 | 0.28 | 14 | 3.63E−02 | −0.61 | 1.5 |
| 7569 | | | | | | | | | | |
| hsa-asg- | 9.22 | 8.86 | 8.71 | 8.98 | 8.94 | 0.19 | 100 | 9.37E−03 | −0.62 | 1.5 |
| 3462 | | | | | | | | | | |
| hsa-asg- | 7.07 | 6.84 | 6.93 | 7.25 | 7.00 | 0.27 | 100 | 4.53E−02 | −0.62 | 1.5 |
| 8227 | | | | | | | | | | |
| hsa-asg-508 | 6.71 | 6.64 | 6.35 | 6.92 | 6.48 | 0.31 | 86 | 3.32E−02 | −0.62 | 1.5 |
| hsa-asg- | 7.97 | 7.72 | 7.47 | 8.34 | 7.78 | 0.29 | 100 | 4.94E−02 | −0.62 | 1.5 |
| 2580 | | | | | | | | | | |
| hsa-asg- | 7.64 | 7.68 | 7.56 | 7.85 | 7.60 | 0.28 | 100 | 2.31E−02 | −0.63 | 1.5 |
| 7687 | | | | | | | | | | |
| hsa-asg-688 | 7.91 | 7.40 | 8.14 | 7.54 | 7.69 | 0.25 | 100 | 1.49E−02 | −0.63 | 1.5 |
| hsa-asg- | 8.25 | 8.21 | 7.68 | 8.28 | 8.02 | 0.28 | 100 | 1.79E−02 | −0.63 | 1.6 |
| 3746 | | | | | | | | | | |
| hsa-asg- | 5.68 | 5.33 | 5.66 | 5.95 | 5.54 | 0.30 | 14 | 4.42E−02 | −0.64 | 1.6 |
| 2041 | | | | | | | | | | |
| hsa-asg-819 | 8.17 | 7.75 | 7.65 | 8.07 | 7.76 | 0.32 | 100 | 4.78E−02 | −0.64 | 1.6 |
| hsa-asg- | 5.08 | 5.45 | 4.66 | 5.07 | 5.02 | 0.27 | 0 | 1.64E−02 | −0.64 | 1.6 |
| 4200 | | | | | | | | | | |
| hsa-asg- | 6.76 | 7.17 | 7.08 | 7.45 | 7.19 | 0.26 | 100 | 2.23E−02 | −0.64 | 1.6 |
| 4469 | | | | | | | | | | |
| hsa-asg- | 5.29 | 5.04 | 5.02 | 5.67 | 5.16 | 0.30 | 29 | 2.09E−02 | −0.65 | 1.6 |
| 10183 | | | | | | | | | | |
| hsa-cand523 | 6.46 | 6.15 | 6.12 | 6.18 | 6.11 | 0.22 | 43 | 5.92E−03 | −0.65 | 1.6 |
| hsa-asg- | 6.44 | 6.76 | 6.28 | 6.57 | 6.42 | 0.24 | 43 | 3.54E−02 | −0.65 | 1.6 |
| 8393 | | | | | | | | | | |
| hsa-asg- | 6.37 | 6.69 | 6.70 | 6.41 | 6.66 | 0.21 | 100 | 4.15E−03 | −0.66 | 1.6 |
| 9729 | | | | | | | | | | |
| hsa-asg- | 6.70 | 6.46 | 6.33 | 6.83 | 6.59 | 0.18 | 43 | 6.64E−03 | −0.66 | 1.6 |
| 6675 | | | | | | | | | | |
| hsa-asg- | 8.37 | 8.11 | 8.23 | 8.18 | 8.11 | 0.22 | 100 | 4.42E−03 | −0.66 | 1.6 |
| 1813 | | | | | | | | | | |
| hsa-asg- | 6.57 | 6.24 | 5.98 | 6.75 | 6.38 | 0.24 | 71 | 8.03E−03 | −0.67 | 1.6 |
| 8562 | | | | | | | | | | |
| hsa-asg- | 7.46 | 7.71 | 7.43 | 7.38 | 7.45 | 0.35 | 100 | 3.60E−02 | −0.67 | 1.6 |
| 11479 | | | | | | | | | | |
| hsa-asg- | 9.64 | 9.49 | 8.79 | 9.50 | 9.22 | 0.32 | 14 | 2.54E−02 | −0.67 | 1.6 |
| 5379 | | | | | | | | | | |
| hsa-asg- | 6.34 | 6.16 | 6.25 | 6.45 | 6.24 | 0.30 | 14 | 1.80E−02 | −0.68 | 1.6 |
| 11563 | | | | | | | | | | |
| hsa-asg- | 7.55 | 7.05 | 6.97 | 7.26 | 7.20 | 0.18 | 100 | 2.32E−03 | −0.68 | 1.6 |
| 2131 | | | | | | | | | | |
| hsa-asg- | 6.87 | 6.46 | 6.44 | 6.87 | 6.71 | 0.22 | 100 | 1.89E−02 | −0.69 | 1.6 |
| 5289 | | | | | | | | | | |
| hsa-asg- | 6.47 | 6.45 | 6.25 | 6.98 | 6.63 | 0.31 | 43 | 2.33E−02 | −0.69 | 1.6 |
| 8565 | | | | | | | | | | |
| hsa-asg- | 6.09 | 5.92 | 5.78 | 5.65 | 5.76 | 0.20 | 57 | 2.21E−03 | −0.69 | 1.6 |
| 4599 | | | | | | | | | | |
| hsa-asg- | 6.26 | 5.77 | 5.83 | 6.61 | 6.12 | 0.39 | 29 | 4.43E−02 | −0.70 | 1.6 |
| 3340 | | | | | | | | | | |
| hsa-asg- | 6.56 | 6.17 | 6.75 | 6.27 | 6.39 | 0.20 | 71 | 7.84E−03 | −0.70 | 1.6 |
| 3694 | | | | | | | | | | |
| hsa-asg- | 12.36 | 12.02 | 12.29 | 12.59 | 12.37 | 0.22 | 100 | 9.45E−03 | −0.70 | 1.6 |
| 9530 | | | | | | | | | | |
| hsa-asg- | 8.21 | 8.11 | 7.37 | 8.26 | 7.95 | 0.34 | 100 | 3.43E−02 | −0.70 | 1.6 |
| 5085 | | | | | | | | | | |
| hsa-asg- | 6.83 | 6.56 | 7.22 | 6.82 | 6.85 | 0.24 | 71 | 7.23E−03 | −0.71 | 1.6 |
| 2588 | | | | | | | | | | |
| hsa-asg- | 6.93 | 7.18 | 6.82 | 7.21 | 7.03 | 0.18 | 100 | 2.20E−03 | −0.71 | 1.6 |
| 5061 | | | | | | | | | | |
| hsa-asg- | 8.41 | 8.05 | 7.85 | 8.36 | 8.13 | 0.24 | 100 | 4.88E−03 | −0.72 | 1.6 |
| 11155 | | | | | | | | | | |
| hsa-asg- | 3.97 | 4.10 | 4.24 | 3.72 | 4.01 | 0.17 | 14 | 2.90E−03 | −0.72 | 1.6 |
| 8672 | | | | | | | | | | |
| hsa-asg- | 7.38 | 7.25 | 6.46 | 7.11 | 7.00 | 0.33 | 100 | 3.40E−02 | −0.72 | 1.7 |
| 1576 | | | | | | | | | | |
| hsa-asg- | 6.62 | 6.35 | 6.43 | 6.59 | 6.31 | 0.37 | 29 | 4.16E−02 | −0.72 | 1.7 |
| 7730 | | | | | | | | | | |
| hsa-asg- | 9.92 | 9.61 | 9.48 | 9.80 | 9.78 | 0.19 | 86 | 4.74E−03 | −0.73 | 1.7 |
| 12247 | | | | | | | | | | |
| hsa-asg- | 7.72 | 7.52 | 7.04 | 7.49 | 7.25 | 0.33 | 100 | 2.01E−02 | −0.73 | 1.7 |
| 9511 | | | | | | | | | | |
| hsa-asg- | 6.41 | 6.43 | 5.55 | 5.73 | 6.02 | 0.33 | 71 | 2.24E−02 | −0.73 | 1.7 |
| 8959 | | | | | | | | | | |
| hsa-asg-797 | 5.43 | 5.38 | 5.14 | 5.48 | 5.32 | 0.14 | 14 | 5.40E−04 | −0.73 | 1.7 |
| hsa-asg-271 | 4.53 | 4.56 | 4.21 | 4.91 | 4.46 | 0.25 | 14 | 5.85E−03 | −0.73 | 1.7 |
| hsa-asg- | 11.61 | 11.16 | 11.31 | 11.87 | 11.49 | 0.27 | 100 | 3.14E−02 | −0.73 | 1.7 |
| 2750 | | | | | | | | | | |
| hsa-asg- | 5.84 | 6.63 | 6.66 | 6.01 | 6.31 | 0.34 | 86 | 3.14E−02 | −0.74 | 1.7 |
| 2693 | | | | | | | | | | |
| hsa-asg-53 | 10.14 | 9.70 | 9.68 | 10.04 | 9.85 | 0.17 | 100 | 9.81E−04 | −0.74 | 1.7 |
| hsa-asg- | 9.52 | 9.33 | 9.65 | 9.45 | 9.37 | 0.19 | 100 | 1.20E−02 | −0.74 | 1.7 |
| 5032 | | | | | | | | | | |
| hsa-asg- | 7.51 | 7.23 | 7.06 | 7.41 | 7.25 | 0.16 | 100 | 3.18E−03 | −0.74 | 1.7 |
| 6892 | | | | | | | | | | |
| hsa-asg- | 7.79 | 6.85 | 7.00 | 6.75 | 6.99 | 0.38 | 100 | 3.64E−02 | −0.75 | 1.7 |
| 1911 | | | | | | | | | | |
| hsa-asg- | 7.13 | 6.79 | 6.72 | 7.04 | 6.73 | 0.33 | 86 | 4.95E−02 | −0.75 | 1.7 |
| 8675 | | | | | | | | | | |
| hsa-asg-809 | 6.51 | 6.49 | 5.76 | 6.38 | 6.18 | 0.35 | 57 | 2.63E−02 | −0.75 | 1.7 |
| hsa-asg- | 8.03 | 7.57 | 7.81 | 8.30 | 7.87 | 0.25 | 100 | 2.50E−02 | −0.75 | 1.7 |
| 11893 | | | | | | | | | | |
| hsa-asg- | 8.18 | 8.03 | 7.48 | 8.27 | 7.93 | 0.28 | 100 | 4.33E−02 | −0.75 | 1.7 |
| 1861 | | | | | | | | | | |
| hsa-asg- | 6.00 | 6.13 | 6.08 | 6.14 | 6.19 | 0.24 | 100 | 3.52E−03 | −0.77 | 1.7 |
| 6651 | | | | | | | | | | |
| hsa-asg-471 | 8.22 | 8.20 | 8.26 | 8.17 | 8.18 | 0.07 | 100 | 2.36E−05 | −0.77 | 1.7 |
| hsa-asg- | 5.59 | 6.32 | 5.55 | 5.65 | 5.92 | 0.40 | 14 | 3.65E−02 | −0.77 | 1.7 |
| 10861 | | | | | | | | | | |
| hsa-asg- | 8.44 | 8.83 | 8.12 | 8.89 | 8.53 | 0.28 | 100 | 8.08E−03 | −0.78 | 1.7 |
| 4310 | | | | | | | | | | |
| hsa-asg- | 7.97 | 8.26 | 7.75 | 8.05 | 8.06 | 0.41 | 100 | 3.48E−02 | −0.80 | 1.7 |
| 7153 | | | | | | | | | | |
| hsa-asg- | 5.48 | 5.71 | 5.49 | 6.18 | 5.74 | 0.26 | 43 | 8.95E−03 | −0.81 | 1.8 |
| 6879 | | | | | | | | | | |
| hsa-asg- | 5.90 | 5.88 | 5.66 | 6.63 | 6.04 | 0.33 | 14 | 1.45E−02 | −0.81 | 1.8 |
| 7352 | | | | | | | | | | |
| hsa-asg- | 7.54 | 7.35 | 7.24 | 7.28 | 7.45 | 0.25 | 100 | 3.40E−03 | −0.82 | 1.8 |
| 12775 | | | | | | | | | | |
| hsa-asg- | 8.06 | 8.07 | 7.04 | 8.28 | 7.91 | 0.40 | 100 | 3.40E−02 | −0.83 | 1.8 |
| 13613 | | | | | | | | | | |
| hsa-asg- | 2.27 | 2.59 | 2.75 | 3.39 | 2.75 | 0.40 | 0 | 3.92E−02 | −0.83 | 1.8 |
| 9748 | | | | | | | | | | |
| hsa-asg- | 6.88 | 7.06 | 6.84 | 7.05 | 6.89 | 0.13 | 100 | 1.29E−03 | −0.83 | 1.8 |
| 7640 | | | | | | | | | | |
| hsa-asg- | 7.41 | 6.54 | 6.90 | 7.16 | 6.90 | 0.31 | 100 | 1.01E−02 | −0.84 | 1.8 |
| 10971 | | | | | | | | | | |
| hsa-asg- | 9.64 | 8.99 | 9.85 | 9.19 | 9.33 | 0.33 | 14 | 1.95E−02 | −0.84 | 1.8 |
| 6092 | | | | | | | | | | |
| hsa-asg-813 | 5.40 | 5.18 | 4.90 | 6.22 | 5.47 | 0.43 | 14 | 3.47E−02 | −0.84 | 1.8 |
| hsa-asg- | 7.79 | 7.54 | 7.17 | 7.98 | 7.60 | 0.27 | 100 | 3.99E−03 | −0.84 | 1.8 |
| 6437 | | | | | | | | | | |
| hsa-asg- | 8.50 | 8.10 | 8.12 | 8.15 | 8.27 | 0.17 | 100 | 2.71E−04 | −0.84 | 1.8 |
| 12946 | | | | | | | | | | |
| hsa-asg- | 8.90 | 8.28 | 8.40 | 8.89 | 8.53 | 0.26 | 100 | 3.02E−03 | −0.85 | 1.8 |
| 6948 | | | | | | | | | | |
| hsa-asg- | 7.97 | 7.23 | 7.51 | 8.28 | 7.68 | 0.39 | 43 | 2.85E−02 | −0.86 | 1.8 |
| 11486 | | | | | | | | | | |
| hsa-cand711 | 10.23 | 9.89 | 9.90 | 10.09 | 9.98 | 0.14 | 100 | 6.98E−05 | −0.86 | 1.8 |
| hsa-cand588 | 6.47 | 6.23 | 6.52 | 7.43 | 6.66 | 0.45 | 86 | 3.57E−02 | −0.88 | 1.8 |
| hsa-asg-555 | 7.31 | 7.21 | 7.52 | 7.62 | 7.21 | 0.34 | 100 | 2.71E−02 | −0.88 | 1.8 |
| hsa-asg- | 7.73 | 7.47 | 8.56 | 8.09 | 7.80 | 0.41 | 43 | 2.37E−02 | −0.88 | 1.8 |
| 6149 | | | | | | | | | | |
| hsa-asg- | 8.09 | 7.91 | 7.21 | 8.35 | 7.76 | 0.40 | 43 | 3.83E−02 | −0.88 | 1.8 |
| 9920 | | | | | | | | | | |
| hsa-asg- | 7.44 | 6.84 | 6.84 | 7.56 | 7.16 | 0.28 | 100 | 1.60E−02 | −0.88 | 1.8 |
| 1391 | | | | | | | | | | |
| hsa-asg- | 7.39 | 7.38 | 6.75 | 7.57 | 7.06 | 0.41 | 100 | 2.63E−02 | −0.88 | 1.8 |
| 3150 | | | | | | | | | | |
| hsa-asg- | 7.02 | 7.19 | 6.25 | 7.30 | 7.00 | 0.42 | 86 | 3.49E−02 | −0.88 | 1.8 |
| 13829 | | | | | | | | | | |
| hsa-asg- | 7.26 | 7.18 | 6.44 | 7.26 | 6.79 | 0.48 | 86 | 4.66E−02 | −0.88 | 1.8 |
| 9382 | | | | | | | | | | |
| hsa-cand855 | 7.29 | 6.56 | 6.86 | 6.91 | 6.79 | 0.34 | 71 | 1.42E−02 | −0.88 | 1.8 |
| hsa-asg- | 8.40 | 7.98 | 7.22 | 8.52 | 7.99 | 0.42 | 100 | 2.42E−02 | −0.89 | 1.9 |
| 10716 | | | | | | | | | | |
| hsa-asg- | 9.09 | 8.81 | 8.38 | 8.97 | 8.80 | 0.27 | 100 | 3.11E−03 | −0.90 | 1.9 |
| 11698 | | | | | | | | | | |
| hsa-cand902 | 6.04 | 6.44 | 5.81 | 6.41 | 6.09 | 0.33 | 29 | 8.47E−03 | −0.90 | 1.9 |
| hsa-asg- | 9.36 | 8.84 | 8.89 | 9.14 | 9.16 | 0.24 | 100 | 1.60E−03 | −0.92 | 1.9 |
| 12919 | | | | | | | | | | |
| hsa-asg- | 5.97 | 4.73 | 5.44 | 5.66 | 5.34 | 0.42 | 14 | 2.03E−02 | −0.92 | 1.9 |
| 4261 | | | | | | | | | | |
| hsa-asg- | 7.20 | 7.05 | 7.54 | 7.10 | 7.22 | 0.16 | 100 | 1.72E−04 | −0.92 | 1.9 |
| 1153 | | | | | | | | | | |
| hsa-asg- | 6.37 | 6.30 | 6.16 | 6.91 | 6.43 | 0.28 | 71 | 1.75E−02 | −0.92 | 1.9 |
| 3841 | | | | | | | | | | |
| hsa-asg- | 11.47 | 11.22 | 11.49 | 11.61 | 11.44 | 0.27 | 100 | 6.61E−03 | −0.92 | 1.9 |
| 3231 | | | | | | | | | | |
| hsa-asg-225 | 5.62 | 5.40 | 5.81 | 6.06 | 5.48 | 0.36 | 14 | 1.67E−02 | −0.93 | 1.9 |
| hsa-asg- | 8.14 | 8.20 | 7.51 | 8.38 | 7.92 | 0.34 | 100 | 1.26E−02 | −0.93 | 1.9 |
| 2017 | | | | | | | | | | |
| hsa-asg- | 7.59 | 7.31 | 7.03 | 8.04 | 7.33 | 0.37 | 100 | 1.23E−02 | −0.93 | 1.9 |
| 6623 | | | | | | | | | | |
| hsa-asg- | 6.20 | 5.86 | 5.96 | 5.75 | 5.83 | 0.21 | 29 | 6.69E−04 | −0.93 | 1.9 |
| 9526 | | | | | | | | | | |
| hsa-asg- | 6.45 | 5.24 | 5.81 | 5.74 | 5.88 | 0.48 | 14 | 3.57E−02 | −0.93 | 1.9 |
| 3014 | | | | | | | | | | |
| hsa-asg- | 7.36 | 8.29 | 7.94 | 8.00 | 7.93 | 0.48 | 100 | 3.31E−02 | −0.94 | 1.9 |
| 12957 | | | | | | | | | | |
| hsa-asg- | 4.62 | 5.01 | 4.00 | 4.81 | 4.76 | 0.38 | 14 | 1.68E−02 | −0.95 | 1.9 |
| 2564 | | | | | | | | | | |
| hsa-asg- | 5.84 | 5.33 | 5.78 | 5.92 | 5.75 | 0.20 | 29 | 5.26E−03 | −0.96 | 2.0 |
| 10473 | | | | | | | | | | |
| hsa-asg- | 4.09 | 4.14 | 3.68 | 4.20 | 3.75 | 0.43 | 0 | 2.32E−02 | −0.97 | 2.0 |
| 8303 | | | | | | | | | | |
| hsa-asg- | 5.58 | 6.30 | 6.32 | 6.18 | 6.26 | 0.40 | 100 | 1.94E−02 | −0.97 | 2.0 |
| 11310 | | | | | | | | | | |
| hsa-asg- | 7.03 | 6.70 | 6.68 | 6.74 | 6.83 | 0.33 | 100 | 5.73E−03 | −0.97 | 2.0 |
| 6831 | | | | | | | | | | |
| hsa-asg- | 7.41 | 8.23 | 7.88 | 7.80 | 7.91 | 0.49 | 71 | 3.60E−02 | −0.97 | 2.0 |
| 11373 | | | | | | | | | | |
| hsa-asg- | 6.69 | 7.48 | 7.00 | 7.31 | 7.10 | 0.33 | 100 | 4.64E−03 | −1.00 | 2.0 |
| 6005 | | | | | | | | | | |
| hsa-asg- | 10.16 | 9.78 | 9.73 | 9.76 | 9.73 | 0.22 | 86 | 1.76E−03 | −1.01 | 2.0 |
| 4654 | | | | | | | | | | |
| hsa-asg- | 8.59 | 8.50 | 8.40 | 8.84 | 8.55 | 0.42 | 100 | 1.56E−02 | −1.01 | 2.0 |
| 9403 | | | | | | | | | | |
| hsa-asg- | 9.08 | 8.61 | 8.72 | 8.94 | 8.71 | 0.30 | 100 | 2.51E−03 | −1.01 | 2.0 |
| 7893 | | | | | | | | | | |
| hsa-asg- | 7.76 | 8.15 | 9.01 | 8.03 | 8.19 | 0.51 | 100 | 3.54E−02 | −1.05 | 2.1 |
| 13000 | | | | | | | | | | |
| hsa-asg- | 6.34 | 7.03 | 7.09 | 7.35 | 6.98 | 0.47 | 100 | 2.02E−02 | −1.05 | 2.1 |
| 10883 | | | | | | | | | | |
| hsa-asg- | 6.19 | 6.11 | 6.37 | 6.57 | 6.12 | 0.27 | 29 | 3.24E−03 | −1.06 | 2.1 |
| 1689 | | | | | | | | | | |
| hsa-asg- | 7.21 | 7.45 | 6.33 | 7.66 | 7.14 | 0.52 | 71 | 4.62E−02 | −1.06 | 2.1 |
| 9412 | | | | | | | | | | |
| hsa-asg- | 9.06 | 8.59 | 9.13 | 8.71 | 8.73 | 0.26 | 100 | 2.57E−03 | −1.07 | 2.1 |
| 3271 | | | | | | | | | | |
| hsa-asg- | 7.92 | 7.41 | 6.44 | 7.75 | 7.41 | 0.49 | 86 | 3.10E−02 | −1.08 | 2.1 |
| 13559 | | | | | | | | | | |
| hsa-asg- | 4.77 | 4.75 | 5.31 | 5.52 | 4.81 | 0.45 | 14 | 1.38E−02 | −1.09 | 2.1 |
| 11898 | | | | | | | | | | |
| hsa-asg- | 4.15 | 4.90 | 4.39 | 5.46 | 4.53 | 0.49 | 0 | 1.97E−02 | −1.10 | 2.1 |
| 3081 | | | | | | | | | | |
| hsa-asg- | 7.29 | 6.62 | 6.20 | 7.41 | 6.82 | 0.42 | 71 | 2.08E−02 | −1.10 | 2.1 |
| 2858 | | | | | | | | | | |
| hsa-asg-278 | 6.33 | 6.52 | 5.76 | 6.70 | 6.08 | 0.55 | 43 | 3.82E−02 | −1.11 | 2.2 |
| hsa-asg- | 9.23 | 9.06 | 8.97 | 9.07 | 8.91 | 0.23 | 100 | 4.65E−04 | −1.11 | 2.2 |
| 5423 | | | | | | | | | | |
| hsa-asg- | 5.08 | 5.77 | 5.66 | 5.90 | 5.58 | 0.31 | 29 | 2.50E−03 | −1.11 | 2.2 |
| 9257 | | | | | | | | | | |
| hsa-asg- | 7.31 | 6.58 | 6.82 | 7.81 | 7.05 | 0.48 | 100 | 1.85E−02 | −1.12 | 2.2 |
| 10197 | | | | | | | | | | |
| hsa-asg- | 8.49 | 7.73 | 7.72 | 8.15 | 8.13 | 0.32 | 100 | 2.69E−03 | −1.14 | 2.2 |
| 6507 | | | | | | | | | | |
| hsa-asg- | 6.64 | 6.24 | 6.27 | 7.16 | 6.62 | 0.33 | 86 | 5.68E−03 | −1.14 | 2.2 |
| 9015 | | | | | | | | | | |
| hsa-asg- | 3.00 | 3.03 | 3.30 | 2.47 | 3.00 | 0.32 | 0 | 2.23E−03 | −1.15 | 2.2 |
| 5460 | | | | | | | | | | |
| hsa-asg- | 10.06 | 10.04 | 9.91 | 10.57 | 10.19 | 0.44 | 100 | 9.65E−03 | −1.16 | 2.2 |
| 13308 | | | | | | | | | | |
| hsa-asg- | 6.30 | 5.56 | 5.28 | 6.05 | 5.79 | 0.34 | 29 | 5.93E−03 | −1.16 | 2.2 |
| 4440 | | | | | | | | | | |
| hsa-asg- | 7.26 | 7.20 | 6.71 | 7.54 | 7.13 | 0.26 | 100 | 3.42E−03 | −1.16 | 2.2 |
| 1375 | | | | | | | | | | |
| hsa-asg- | 7.11 | 6.74 | 6.28 | 6.97 | 6.74 | 0.31 | 71 | 1.16E−02 | −1.17 | 2.3 |
| 8763 | | | | | | | | | | |
| hsa-asg- | 8.90 | 10.21 | 9.61 | 9.90 | 9.76 | 0.54 | 100 | 2.17E−02 | −1.19 | 2.3 |
| 2872 | | | | | | | | | | |
| hsa-asg- | 7.41 | 8.16 | 7.48 | 7.69 | 7.83 | 0.42 | 100 | 6.30E−03 | −1.20 | 2.3 |
| 12460 | | | | | | | | | | |
| hsa-asg- | 6.64 | 6.59 | 6.28 | 6.91 | 6.44 | 0.40 | 29 | 5.62E−03 | −1.21 | 2.3 |
| 8138 | | | | | | | | | | |
| hsa-asg- | 10.21 | 10.17 | 10.09 | 10.64 | 10.31 | 0.38 | 100 | 3.56E−03 | −1.21 | 2.3 |
| 5304 | | | | | | | | | | |
| hsa-asg- | 6.63 | 6.25 | 6.49 | 6.79 | 6.41 | 0.26 | 14 | 1.14E−02 | −1.21 | 2.3 |
| 4971 | | | | | | | | | | |
| hsa-asg- | 7.85 | 7.27 | 7.45 | 7.45 | 7.38 | 0.25 | 100 | 6.72E−04 | −1.23 | 2.4 |
| 9343 | | | | | | | | | | |
| hsa-asg- | 6.19 | 6.52 | 6.21 | 6.96 | 6.36 | 0.31 | 71 | 1.00E−03 | −1.24 | 2.4 |
| 8271 | | | | | | | | | | |
| hsa-asg- | 7.70 | 8.18 | 8.07 | 8.66 | 8.30 | 0.35 | 100 | 4.90E−03 | −1.25 | 2.4 |
| 13260 | | | | | | | | | | |
| hsa-asg- | 6.17 | 6.19 | 5.63 | 4.94 | 5.54 | 0.62 | 14 | 2.98E−02 | −1.26 | 2.4 |
| 12105 | | | | | | | | | | |
| hsa-asg- | 4.21 | 4.68 | 3.03 | 4.10 | 4.06 | 0.66 | 29 | 4.45E−02 | −1.26 | 2.4 |
| 7685 | | | | | | | | | | |
| hsa-asg- | 6.53 | 6.61 | 7.48 | 7.28 | 6.94 | 0.42 | 100 | 4.87E−03 | −1.27 | 2.4 |
| 3360 | | | | | | | | | | |
| hsa-asg- | 5.45 | 5.95 | 6.49 | 6.27 | 6.06 | 0.49 | 57 | 2.32E−02 | −1.28 | 2.4 |
| 5576 | | | | | | | | | | |
| hsa-asg- | 6.34 | 5.88 | 5.40 | 6.34 | 5.94 | 0.40 | 29 | 1.37E−02 | −1.29 | 2.4 |
| 4843 | | | | | | | | | | |
| hsa-asg- | 5.77 | 6.28 | 5.90 | 6.18 | 6.17 | 0.49 | 29 | 1.41E−02 | −1.29 | 2.4 |
| 7009 | | | | | | | | | | |
| hsa-asg- | 4.98 | 4.83 | 5.34 | 4.76 | 5.04 | 0.29 | 0 | 7.84E−03 | −1.30 | 2.5 |
| 8928 | | | | | | | | | | |
| hsa-asg- | 5.90 | 5.78 | 5.55 | 6.29 | 5.67 | 0.38 | 14 | 4.72E−03 | −1.32 | 2.5 |
| 12777 | | | | | | | | | | |
| hsa-asg- | 5.29 | 6.38 | 6.35 | 6.54 | 6.27 | 0.59 | 43 | 2.15E−02 | −1.35 | 2.6 |
| 7069 | | | | | | | | | | |
| hsa-cand965 | 5.89 | 7.57 | 7.23 | 7.51 | 7.29 | 0.66 | 29 | 4.98E−02 | −1.38 | 2.6 |
| hsa-asg- | 5.92 | 5.95 | 6.08 | 6.24 | 6.06 | 0.18 | 43 | 1.88E−03 | −1.38 | 2.6 |
| 13693 | | | | | | | | | | |
| hsa-asg- | 6.40 | 6.00 | 5.14 | 6.55 | 6.05 | 0.45 | 43 | 7.16E−03 | −1.40 | 2.6 |
| 8329 | | | | | | | | | | |
| hsa-asg- | 7.21 | 6.85 | 6.38 | 7.46 | 6.74 | 0.52 | 71 | 1.05E−02 | −1.43 | 2.7 |
| 3597 | | | | | | | | | | |
| hsa-asg- | 5.99 | 6.19 | 6.05 | 5.82 | 6.05 | 0.30 | 57 | 6.21E−03 | −1.44 | 2.7 |
| 9852 | | | | | | | | | | |
| hsa-asg- | 4.29 | 5.06 | 4.45 | 4.18 | 4.41 | 0.34 | 0 | 1.68E−03 | −1.45 | 2.7 |
| 3107 | | | | | | | | | | |
| hsa-asg- | 12.09 | 11.62 | 12.09 | 12.34 | 12.07 | 0.52 | 100 | 7.47E−03 | −1.47 | 2.8 |
| 14245 | | | | | | | | | | |
| hsa-asg- | 5.55 | 6.37 | 5.92 | 6.27 | 6.05 | 0.30 | 29 | 1.95E−03 | −1.47 | 2.8 |
| 6949 | | | | | | | | | | |
| hsa-asg- | 5.51 | 5.67 | 5.34 | 5.86 | 5.54 | 0.20 | 57 | 2.22E−04 | −1.52 | 2.9 |
| 7319 | | | | | | | | | | |
| hsa-asg- | 6.32 | 6.22 | 5.63 | 6.72 | 6.30 | 0.45 | 43 | 7.44E−03 | −1.52 | 2.9 |
| 9022 | | | | | | | | | | |
| hsa-asg- | 6.52 | 6.80 | 5.94 | 6.66 | 6.40 | 0.34 | 71 | 5.08E−04 | −1.56 | 2.9 |
| 12246 | | | | | | | | | | |
| hsa-asg- | 7.13 | 7.51 | 7.37 | 7.66 | 7.46 | 0.56 | 86 | 6.76E−03 | −1.58 | 3.0 |
| 8917 | | | | | | | | | | |
| hsa-asg- | 6.60 | 6.87 | 6.20 | 6.42 | 6.85 | 0.51 | 100 | 5.18E−03 | −1.60 | 3.0 |
| 13244 | | | | | | | | | | |
| hsa-cand345 | 6.17 | 6.16 | 5.85 | 6.83 | 6.10 | 0.41 | 71 | 1.58E−03 | −1.61 | 3.0 |
| hsa-asg- | 5.99 | 7.07 | 7.51 | 7.63 | 7.32 | 0.78 | 100 | 4.16E−02 | −1.62 | 3.1 |
| 12702 | | | | | | | | | | |
| hsa-asg- | 6.78 | 6.78 | 6.67 | 6.76 | 6.84 | 0.17 | 100 | 2.98E−04 | −1.67 | 3.2 |
| 13230 | | | | | | | | | | |
| hsa-asg- | 6.74 | 6.97 | 5.90 | 6.60 | 6.84 | 0.58 | 100 | 1.10E−02 | −1.69 | 3.2 |
| 12902 | | | | | | | | | | |
| hsa-asg- | 6.50 | 7.57 | 6.95 | 7.53 | 7.17 | 0.39 | 100 | 2.48E−03 | −1.71 | 3.3 |
| 13237 | | | | | | | | | | |
| hsa-asg- | 6.01 | 7.72 | 7.23 | 7.51 | 7.13 | 0.85 | 86 | 2.80E−02 | −1.75 | 3.4 |
| 4002 | | | | | | | | | | |
| hsa-asg-21 | 4.64 | 6.59 | 6.30 | 6.40 | 6.05 | 0.75 | 86 | 3.18E−02 | −1.77 | 3.4 |
| hsa-asg- | 6.80 | 7.78 | 7.50 | 7.81 | 7.62 | 0.48 | 86 | 2.61E−03 | −1.79 | 3.5 |
| 10149 | | | | | | | | | | |
| hsa-asg- | 7.20 | 7.17 | 6.77 | 6.40 | 6.97 | 0.53 | 100 | 2.85E−02 | −1.83 | 3.6 |
| 5303 | | | | | | | | | | |
| hsa-asg- | 4.64 | 6.80 | 5.76 | 6.43 | 6.24 | 0.83 | 71 | 4.84E−02 | −1.84 | 3.6 |
| 10666 | | | | | | | | | | |
| hsa-asg-335 | 6.22 | 8.78 | 7.94 | 8.01 | 7.82 | 1.01 | 100 | 4.11E−02 | −1.88 | 3.7 |
| hsa-asg- | 5.40 | 7.00 | 6.32 | 6.33 | 6.21 | 0.61 | 29 | 3.93E−03 | −1.98 | 3.9 |
| 6250 | | | | | | | | | | |
| hsa-asg- | 4.84 | 6.07 | 5.90 | 7.15 | 6.08 | 0.78 | 29 | 1.18E−02 | −1.98 | 4.0 |
| 8208 | | | | | | | | | | |
| hsa-asg- | 6.14 | 8.68 | 8.01 | 8.23 | 7.78 | 1.09 | 100 | 4.01E−02 | −2.04 | 4.1 |
| 10387 | | | | | | | | | | |
| hsa-asg- | 9.18 | 8.89 | 8.86 | 10.09 | 9.20 | 0.58 | 100 | 1.86E−03 | −2.09 | 4.2 |
| 13248 | | | | | | | | | | |
| hsa-asg- | 4.58 | 6.46 | 6.44 | 5.31 | 5.67 | 0.87 | 71 | 2.27E−02 | −2.12 | 4.4 |
| 12079 | | | | | | | | | | |
| hsa-asg- | 7.60 | 8.20 | 7.32 | 7.98 | 7.57 | 0.40 | 100 | 5.68E−04 | −2.13 | 4.4 |
| 4557 | | | | | | | | | | |
| hsa-asg- | 8.05 | 8.75 | 8.88 | 9.64 | 8.92 | 0.62 | 100 | 1.81E−02 | −2.17 | 4.5 |
| 13937 | | | | | | | | | | |
| hsa-miR165 | 6.70 | 5.83 | 5.14 | 5.80 | 5.55 | 0.63 | 14 | 7.52E−03 | −2.18 | 4.5 |
| hsa-asg- | 5.81 | 6.86 | 6.68 | 7.27 | 6.65 | 0.96 | 86 | 1.84E−02 | −2.24 | 4.7 |
| 8682 | | | | | | | | | | |
| hsa-asg- | 4.73 | 6.11 | 5.83 | 5.74 | 5.71 | 0.61 | 29 | 4.97E−03 | −2.27 | 4.8 |
| 6413 | | | | | | | | | | |
| hsa-asg- | 6.29 | 6.82 | 6.28 | 7.15 | 6.60 | 0.42 | 86 | 1.45E−03 | −2.29 | 4.9 |
| 13304 | | | | | | | | | | |
| hsa-asg- | 4.46 | 6.75 | 6.28 | 6.63 | 5.93 | 1.04 | 71 | 3.02E−02 | −2.29 | 4.9 |
| 4205 | | | | | | | | | | |
| hsa-asg-870 | 5.18 | 6.42 | 6.05 | 6.50 | 6.12 | 1.05 | 43 | 1.74E−02 | −2.44 | 5.4 |
| hsa-asg- | 9.80 | 10.34 | 10.32 | 10.76 | 10.27 | 0.34 | 100 | 1.37E−03 | −2.46 | 5.5 |
| 7074 | | | | | | | | | | |
| hsa-asg- | 7.36 | 7.25 | 6.90 | 7.66 | 7.42 | 0.37 | 100 | 9.08E−03 | −2.48 | 5.6 |
| 13279 | | | | | | | | | | |
| hsa-miR- | 10.97 | 10.63 | 10.28 | 11.16 | 10.88 | 0.36 | 100 | 5.79E−03 | −1.24 | 2.4 |
| 29b | | | | | | | | | | |
| hsa-miR-9 | 3.74 | 3.48 | 4.00 | 4.74 | 3.68 | 0.62 | 0 | 2.64E−02 | 2.10 | 4.3 |
| hsa-miR- | 7.54 | 6.20 | 6.64 | 7.66 | 6.81 | 0.63 | 86 | 7.95E−03 | 1.73 | 3.3 |
| 421 | | | | | | | | | | |

SD, standard deviation;
%, percentage of samples expressing miRNA above background levels;
Log2 Diff, difference in VSN-transformed expression between MEL and LNneg samples.

### Example 11

### miRNAs Differentially Expressed between Cancer-positive and Cancer-negative Lymph Nodes from Melanoma Patients

[0261] To identify miRNAs that are useful markers for metastasis of melanoma to lymph nodes, the inventors identified miRNAs that are expressed at significantly higher levels in cancer-positive lymph nodes (LNpos, frozen biopsy specimens, Table 9) than in cancer-negative lymph nodes (LNneg1-7, frozen biopsy specimens, Table 9), from melanoma patients. miRNAs were purified and expression was analyzed with microarrays as described above in Example 2. miRNA expression profiles were established for three positive lymph nodes (LNpos1A, LNpos2B, LNpos3B) and compared with expression profiles from the seven cancer-negative lymph nodes (LNneg1-7) and expression profiles from two melanoma (MEL1, MEL3) samples. Pearson correlation analyses indicated that the correlation between arrays was higher between the LNpos and the MEL samples than between the LNpos and LNneg samples (data not shown). Further analysis also revealed significant differences between the miRNA expression profiles of one positive lymph node (LNpos1A) and those of the two other positive lymph nodes (LNpos2B and 3B) for a subset of miRNAs (data not shown). Therefore, data were reanalyzed with the positive lymph nodes separated into two distinct groups for the analysis (LNposA for LNpos1A and LNposB for LNpos2B and 3B). Under these new conditions, hierarchical clustering analysis, as well as principal component analysis on the significantly differentially expressed miRNAs between the four different groups of samples confirmed the heterogeneity between LNposA and LNposB (FIG. 6). The existence of two subgroups within the positive lymph node samples was confirmed by further real time RT-PCR analysis. The LNpos1A sample was from a patient with a primary melanoma and regional metastasis, but no distant metastasis. The melanoma was invasive through the reticular dermis into the subcutaneous tissue (Clark's level V), and seven of eight lymph nodes from the patient were cancer-positive. The LNpos3B sample was from a patient with recurrent melanoma, and the LNpos2B sample was from a patient with a cancer of unknown primary origin (CUP). As the histopathological reports of the primary tumors were very similar in all cases (Table 9), these data suggest that recurrent melanoma and CUP differ from first-step metastatic tumors at the molecular level.

[0262] As a consequence of the heterogeneity within the positive lymph nodes, comparisons of miRNA expression between cancer-positive and cancer-negative lymph nodes were made separately with the two LNpos subgroups, LNposA (Table 11) and LNposB (Table 12).

[0263] Seventy miRNAs (36 verified and 34 predicted) were determined to have significantly higher average expression levels in LNpos1A sample as compared to their average expression levels in LNneg samples (log 2-Diff (LNpos1A vs LNneg)≧1 and t-test (LNpos1A vs LNneg)<0.05) (Table 11). Among the verified miRNAs, hsa-miR-211 and -375 were expressed between 90- and 140-fold higher in LNpos1A than in LNneg; seven miRNAs (hsa-miR-203, -200b, -200c, -509, -513, -429, and -767-5p) were expressed at levels between 20- and 50-fold higher in LNpos1A than in LNneg; and 15 miRNAs had average expression levels between 5- and 20-fold higher in LNpos1A compared to LNneg (Table 11). In addition, 14 miRNAs had average expression levels between 2- and 5-fold lower in LNpos1A than in LNneg. Among the predicted miRNAs, three (hsa-asg-5638_st2, -1296_st1, -7637_st2) were expressed at levels at least 10-fold higher in LNpos1A than in LNneg; and four miRNAs (hsa-asg-4803_st2, -11338_st2, -1519_st1, and -14208-st1) were expressed at levels between 5- and 10-fold higher in LNpos1A than in LNneg samples (Table 11).

TABLE 11
MicroRNAs Differentially Expressed Between Cancer-Positive Lymph Node Group A Sample (LNpos1A)
and Cancer-Negative Lymph Node Samples (LNneg1-7) from Melanoma Patients.

| | Probe | LNpos | | LNneg | | | | | | |
|---|---|---|---|---|---|---|---|---|---|---|
| MicroRNA | ID | 1A | % | 1 | 2 | 3 | 4 | 5 | 6 | 7 |
| hsa-miR-211 | hsa-miR-211_st1 | 11.1 | 100 | 3.20 | 5.75 | 2.62 | 4.64 | 5.22 | 4.00 | 3.05 |
| hsa-miR-375 | hsa-miR-375_st1 | 10.7 | 100 | 3.87 | 5.12 | 3.26 | 4.79 | 4.10 | 3.84 | 4.87 |
| hsa-miR-203 | hsa-miR-203_st2 | 11.4 | 100 | 4.37 | 5.90 | 5.84 | 5.94 | 5.88 | 6.58 | 6.38 |
| hsa-miR-200b | has-miR-200b_st1 | 12.4 | 100 | 6.34 | 6.10 | 6.86 | 7.11 | 6.78 | 7.40 | 8.10 |
| hsa-miR-200c | hsa-miR-200c_st1 | 13.1 | 100 | 8.90 | 7.29 | 7.04 | 8.69 | 6.85 | 7.87 | 7.98 |
| hsa-miR-509 | hsa-miR-509_st2 | 11.6 | 100 | 6.09 | 8.04 | 6.00 | 5.45 | 7.04 | 6.25 | 6.22 |
| hsa-miR-513 | hsa-miR-513_st1 | 10.2 | 100 | 3.01 | 7.12 | 5.52 | 5.21 | 5.40 | 5.47 | 5.75 |
| hsa-miR-429 | hsa-miR-429_st1 | 7.46 | 100 | 3.01 | 3.06 | 2.62 | 3.00 | 2.66 | 2.86 | 3.62 |
| hsa-miR-767-5p | hsa-asg-558_st1 | 7.44 | 100 | 2.69 | 3.70 | 2.76 | 2.76 | 2.66 | 2.40 | 3.81 |
| hsa-miR-187 | hsa-miR-187_st1 | 7.81 | 100 | 2.90 | 2.82 | 4.01 | 4.42 | 3.94 | 3.49 | 4.15 |
| hsa-miR-592 | hsa-miR-592_st1 | 6.89 | 100 | 2.80 | 3.40 | 3.14 | 3.52 | 2.27 | 2.51 | 3.28 |
| hsa-miR-204 | hsa-miR-204_st2 | 9.77 | 100 | 3.80 | 6.02 | 5.29 | 7.03 | 6.43 | 6.10 | 6.45 |
| hsa-miR-105 | hsa-miR-105_st1 | 6.86 | 100 | 3.01 | 3.29 | 3.59 | 3.63 | 2.78 | 4.27 | 4.27 |
| hsa-miR-132 | hsa-miR-132_st1 | 8.84 | 100 | 6.62 | 4.36 | 4.55 | 7.38 | 5.36 | 4.76 | 5.89 |
| hsa-miR-200a | hsa-miR-200a_st2 | 8.76 | 100 | 4.84 | 5.36 | 4.88 | 6.08 | 5.59 | 5.31 | 6.40 |
| hsa-miR-605 | hsa-miR-605_st1 | 6.32 | 100 | 3.48 | 3.06 | 2.95 | 3.05 | 2.34 | 3.40 | 3.31 |
| hsa-miR-215 | hsa-miR-215_st1 | 9.98 | 100 | 6.29 | 6.90 | 6.91 | 6.94 | 6.44 | 7.29 | 8.01 |
| hsa-miR-183 | hsa-miR-183_st1 | 9.26 | 100 | 5.47 | 6.35 | 6.90 | 6.94 | 6.34 | 6.12 | 6.04 |
| hsa-miR-196b | hsa-miR-196b_st2 | 10.0 | 100 | 6.69 | 7.00 | 6.23 | 9.13 | 7.24 | 6.67 | 7.32 |
| hsa-miR-508 | hsa-miR-508_st1 | 9.50 | 100 | 6.06 | 7.31 | 7.14 | 6.49 | 6.65 | 6.49 | 6.15 |
| hsa-miR-493-5p | hsa-miR-493-5p_st1 | 7.10 | 100 | 3.64 | 3.70 | 3.26 | 4.75 | 3.77 | 5.49 | 5.40 |
| hsa-miR-194 | hsa-miR-194_st2 | 12.2 | 100 | 8.75 | 9.43 | 9.39 | 9.35 | 9.29 | 10.3 | 10.5 |
| hsa-miR-421 | hsa-miR-421-3p_st1 | 10.08 | 100 | 7.78 | 6.55 | 6.63 | 8.46 | 7.14 | 7.29 | 8.29 |
| hsa-miR-192 | hsa-miR-192_st2 | 13.1 | 100 | 10.2 | 10.1 | 10.6 | 10.2 | 10.0 | 11.3 | 11.5 |
| hsa-miR-1 | hsa-miR-1_st1 | 11.8 | 100 | 8.27 | 9.62 | 8.72 | 10.7 | 10.1 | 9.58 | 10.0 |
| hsa-miR-506 | hsa-miR-506_st2 | 8.70 | 100 | 6.15 | 7.11 | 6.59 | 6.01 | 6.77 | 6.66 | 6.08 |
| hsa-miR-584 | hsa-miR-584_st2 | 7.67 | 100 | 4.80 | 5.52 | 5.44 | 5.12 | 5.71 | 5.61 | 6.12 |
| hsa-miR-522 | hsa-miR-522_st2 | 6.53 | 100 | 4.48 | 3.96 | 3.59 | 5.07 | 4.44 | 5.17 | 3.62 |
| hsa-miR-510 | hsa-miR-510_st2 | 7.15 | 100 | 4.62 | 5.83 | 5.85 | 4.88 | 5.04 | 4.33 | 4.66 |
| hsa-miR-576 | hsa-miR-576_st2 | 4.91 | 0 | 2.80 | 2.44 | 3.26 | 3.18 | 2.91 | 2.28 | 3.20 |
| hsa-miR-495 | hsa-miR-495_st1 | 6.77 | 100 | 4.26 | 4.84 | 4.28 | 5.04 | 4.92 | 5.44 | 5.38 |
| hsa-miR-182 | hsa-miR-182_st1 | 10.3 | 100 | 7.90 | 8.91 | 8.60 | 9.24 | 8.03 | 8.90 | 8.80 |
| hsa-miR-514 | hsa-miR-514_st1 | 4.58 | 0 | 3.01 | 3.06 | 2.89 | 2.91 | 3.03 | 2.98 | 3.05 |
| hsa-miR-450 | hsa-miR-450_st2 | 5.41 | 0 | 3.30 | 4.39 | 3.02 | 4.49 | 3.86 | 3.59 | 4.32 |
| hsa-miR-382 | hsa-miR-382_st1 | 7.90 | 100 | 6.09 | 5.99 | 6.13 | 7.03 | 6.42 | 6.79 | 7.17 |
| hsa-miR-10a | hsa-miR-10a_st1 | 12.1 | 100 | 10.6 | 11.0 | 10.6 | 11.5 | 11.3 | 11.0 | 11.5 |
| hsa-miR-30d | hsa-miR-30d_st1 | 13.1 | 100 | 11.8 | 12.3 | 12.2 | 12.4 | 12.2 | 12.4 | 12.6 |
| hsa-miR-30a-5p | hsa-miR-30a-5p_st2 | 12.4 | 100 | 11.2 | 11.6 | 11.6 | 11.7 | 11.6 | 11.7 | 12.1 |
| hsa-miR-27b | hsa-miR-27b_st1 | 12.8 | 100 | 11.9 | 12.0 | 12.0 | 12.2 | 12.2 | 12.1 | 12.3 |
| hsa-miR-23b | hsa-miR-23b_st1 | 13.7 | 100 | 13.3 | 13.1 | 13.2 | 13.4 | 13.3 | 13.0 | 13.1 |
| hsa-miR-21 | hsa-miR-21_st2 | 13.7 | 100 | 13.1 | 13.6 | 13.2 | 13.2 | 13.2 | 13.2 | 13.2 |
| hsa-let-7e | hsa-let-7e_st1 | 12.6 | 100 | 12.0 | 12.2 | 12.1 | 12.2 | 12.3 | 12.0 | 12.2 |
| hsa-miR-155 | hsa-miR-155_st1 | 13.2 | 100 | 13.9 | 13.8 | 13.8 | 13.6 | 13.6 | 13.5 | 13.6 |
| hsa-miR-195 | hsa-miR-195_st2 | 12.1 | 100 | 12.7 | 13.0 | 12.8 | 12.9 | 13.0 | 12.6 | 12.8 |
| hsa-miR-564 | hsa-miR-564_st2 | 5.83 | 0 | 7.17 | 6.77 | 6.58 | 7.56 | 6.76 | 6.60 | 6.85 |
| hsa-miR-34a | hsa-miR-34a_st1 | 6.99 | 100 | 7.72 | 7.95 | 8.14 | 7.89 | 7.98 | 8.36 | 8.64 |
| hsa-miR-22 | hsa-miR-22_st1 | 10.3 | 100 | 10.6 | 11.6 | 11.7 | 11.2 | 11.7 | 11.8 | 11.9 |
| hsa-miR-15a | hsa-miR-15a_st1 | 10.4 | 100 | 12.1 | 11.7 | 11.4 | 11.6 | 11.2 | 11.5 | 12.1 |
| hsa-miR-342 | hsa-miR-342_st1 | 12.2 | 100 | 13.3 | 13.7 | 13.8 | 13.3 | 13.5 | 13.5 | 13.4 |
| hsa-miR-186 | hsa-miR-186_st1 | 6.33 | 100 | 7.38 | 7.96 | 7.26 | 7.76 | 7.96 | 7.43 | 8.71 |
| hsa-miR-142-3p | hsa-miR-142-3p_st2 | 3.34 | 0 | 5.20 | 5.14 | 5.11 | 4.97 | 4.78 | 5.06 | 6.15 |
| hsa-miR-486 | hsa-miR-486_st2 | 6.10 | 0 | 8.19 | 7.39 | 8.20 | 8.08 | 7.23 | 8.54 | 8.29 |
| hsa-miR-29b | hsa-miR-29b_st1 | 8.95 | 100 | 11.2 | 11.0 | 10.8 | 10.9 | 10.4 | 10.3 | 11.0 |
| hsa-miR-29c | hsa-miR-29c_st2 | 8.50 | 100 | 11.1 | 10.4 | 10.4 | 9.85 | 9.82 | 10.2 | 10.9 |
| hsa-miR-199a | hsa-miR-199a_st2 | 8.21 | 100 | 9.52 | 10.1 | 10.1 | 10.1 | 10.4 | 10.3 | 10.5 |
| hsa-miR-497 | hsa-miR43_st1 | 5.55 | 0 | 7.19 | 7.68 | 7.66 | 7.25 | 7.91 | 7.69 | 7.88 |
| hsa-miR-598 | hsa-miR-598_st2 | 4.95 | 0 | 8.05 | 6.96 | 6.71 | 6.71 | 6.13 | 7.22 | 7.99 |
| hsa-asg-5638 | hsa-asg-5638_st2 | 8.00 | 100 | 3.20 | 5.22 | 3.02 | 2.95 | 3.48 | 3.59 | 3.49 |
| hsa-asg-1296 | hsa-asg-1296_st1 | 6.41 | 0 | 3.20 | 2.94 | 2.62 | 3.23 | 2.91 | 3.19 | 2.97 |
| hsa-asg-7637 | hsa-asg-7637_st2 | 7.25 | 100 | 3.56 | 3.79 | 3.69 | 4.32 | 3.68 | 3.76 | 4.32 |
| hsa-asg-4803 | hsa-asg-4803_st2 | 7.48 | 100 | 4.26 | 3.83 | 4.83 | 4.09 | 5.41 | 2.86 | 5.11 |
| hsa-asg-11338 | hsa-asg-11338_st2 | 6.79 | 100 | 4.32 | 3.88 | 3.54 | 3.70 | 4.47 | 3.68 | 4.15 |
| hsa-asg-1519 | hsa-asg-1519_st1 | 9.22 | 100 | 5.74 | 6.92 | 7.20 | 6.03 | 7.32 | 6.38 | 5.77 |
| hsa-asg-14208 | hsa-asg-14208_st1 | 7.10 | 100 | 3.80 | 3.70 | 4.39 | 4.21 | 3.98 | 5.14 | 5.46 |
| hsa-asg-9514 | hsa-asg-9514_st1 | 5.25 | 0 | 3.01 | 3.18 | 3.02 | 3.09 | 2.40 | 3.49 | 3.13 |
| hsa-asg-247 | hsa-asg-247_st1 | 7.54 | 100 | 5.17 | 5.48 | 5.27 | 5.52 | 4.95 | 5.40 | 5.66 |
| hsa-asg-11361 | hsa-asg-11361_st2 | 5.44 | 100 | 2.90 | 3.18 | 3.38 | 3.81 | 3.48 | 3.49 | 3.28 |
| hsa-asg-1268 | hsa-asg-1268_st1 | 6.20 | 100 | 4.08 | 3.96 | 3.20 | 4.51 | 4.06 | 4.81 | 4.92 |
| hsa-asg-9980 | hsa-asg-9980_st1 | 6.24 | 100 | 4.37 | 4.33 | 3.74 | 4.73 | 3.90 | 4.07 | 4.83 |
| hsa-asg-9987 | hsa-asg-9987_st2 | 7.30 | 100 | 5.74 | 5.29 | 5.35 | 5.13 | 5.33 | 4.81 | 6.05 |
| hsa-asg-2381 | hsa-asg-2381_st2 | 7.86 | 100 | 6.04 | 6.16 | 5.64 | 5.85 | 6.15 | 5.63 | 6.58 |
| hsa-asg-3711 | hsa-asg-3711_st2 | 7.17 | 100 | 4.43 | 5.77 | 5.58 | 6.02 | 5.24 | 5.06 | 5.70 |
| hsa-cand660 | hsa-cand660_st1 | 4.52 | 0 | 2.90 | 2.31 | 3.38 | 3.09 | 2.78 | 2.51 | 2.81 |
| hsa-asg-5998 | hsa-asg-5998_st1 | 8.01 | 100 | 6.28 | 5.83 | 6.86 | 6.29 | 5.83 | 6.10 | 7.41 |
| hsa-asg-4460 | hsa-asg-4460_st2 | 6.56 | 100 | 4.58 | 5.18 | 5.61 | 5.35 | 4.97 | 5.06 | 4.60 |
| hsa-asg-9723 | hsa-asg-9723_st2 | 4.35 | 0 | 3.01 | 3.29 | 2.36 | 2.52 | 3.15 | 2.98 | 2.81 |
| hsa-asg-6457 | hsa-asg-6457_st2 | 6.46 | 100 | 4.20 | 4.63 | 5.64 | 5.05 | 5.36 | 5.37 | 4.84 |
| hsa-asg-2261 | hsa-asg-2261_st1 | 4.70 | 0 | 3.11 | 3.40 | 3.08 | 3.14 | 3.09 | 3.19 | 4.00 |
| hsa-asg-8428 | hsa-asg-8428_st2 | 4.35 | 0 | 3.01 | 3.06 | 2.76 | 3.27 | 3.68 | 2.28 | 2.72 |
| hsa-asg-11380 | hsa-asg-11380_st2 | 4.47 | 0 | 2.80 | 2.69 | 3.59 | 3.09 | 3.37 | 3.30 | 2.81 |
| hsa-asg-7423 | hsa-asg-7423_st2 | 7.08 | 100 | 4.92 | 5.49 | 6.07 | 5.82 | 5.79 | 5.47 | 6.52 |
| hsa-asg-1616 | hsa-asg-1616_st2 | 8.94 | 100 | 8.00 | 7.07 | 7.79 | 7.12 | 7.46 | 7.80 | 7.89 |
| hsa-asg-3341 | hsa-asg-3341_st1 | 5.81 | 100 | 4.53 | 4.93 | 4.49 | 4.24 | 5.14 | 4.66 | 4.32 |
| hsa-asg-12666 | hsa-asg-12666_st2 | 6.55 | 100 | 5.03 | 5.40 | 6.03 | 5.29 | 5.16 | 4.98 | 5.69 |
| hsa-asg-7471 | hsa-asg-7471_st1 | 7.19 | 100 | 6.37 | 6.04 | 5.69 | 6.01 | 6.01 | 5.90 | 6.17 |
| hsa-asg-4401 | hsa-asg-4401_st1 | 7.20 | 100 | 6.06 | 5.80 | 6.17 | 6.38 | 6.75 | 5.63 | 6.20 |
| hsa-asg-2500 | hsa-asg-2500_st1 | 6.81 | 100 | 5.52 | 5.83 | 5.94 | 6.02 | 6.21 | 5.47 | 5.40 |
| hsa-asg-1124 | hsa-asg-1124_st2 | 5.38 | 100 | 4.20 | 4.68 | 4.35 | 4.00 | 4.68 | 4.51 | 4.08 |
| hsa-asg-13798 | hsa-asg-13798_st1 | 5.92 | 100 | 4.53 | 5.14 | 4.88 | 5.00 | 5.40 | 4.94 | 4.60 |
| hsa-asg-3798 | hsa-asg-3798_st1 | 6.41 | 100 | 5.17 | 5.64 | 5.64 | 5.65 | 5.73 | 4.98 | 5.26 |
| hsa-asg-13997 | hsa-asg-13997_st2 | 3.79 | 0 | 3.01 | 2.57 | 3.49 | 2.81 | 2.78 | 2.63 | 2.47 |
| hsa-asg-4477 | hsa-asg-4477_st2 | 5.78 | 100 | 4.58 | 5.40 | 4.67 | 4.71 | 4.68 | 4.71 | 5.05 |
| hsa-asg-14186 | hsa-asg-14186_st2 | 5.85 | 100 | 4.80 | 4.74 | 4.83 | 4.93 | 5.14 | 5.55 | 5.05 |
| hsa-asg-11579 | hsa-asg-11579_st2 | 6.40 | 100 | 5.10 | 5.73 | 5.76 | 5.91 | 5.78 | 5.44 | 5.26 |
| hsa-asg-12271 | hsa-asg-12271_st1 | 5.31 | 0 | 4.48 | 4.51 | 4.49 | 4.32 | 4.17 | 4.90 | 4.97 |
| hsa-asg-6616 | hsa-asg-6616_st1 | 6.83 | 100 | 5.93 | 6.59 | 5.98 | 5.82 | 6.23 | 5.96 | 5.99 |
| hsa-asg-1301 | hsa-asg-1301_st1 | 5.25 | 100 | 4.71 | 4.88 | 4.42 | 4.49 | 4.51 | 4.51 | 4.08 |
| hsa-asg-841 | hsa-asg-841_st1 | 5.59 | 0 | 4.88 | 4.84 | 5.05 | 4.92 | 4.95 | 4.51 | 4.95 |
| hsa-asg-4033 | hsa-asg-4033_st2 | 6.85 | 100 | 6.49 | 6.30 | 6.19 | 6.06 | 6.00 | 5.85 | 6.14 |
| hsa-asg-4030 | hsa-asg-4030_st2 | 5.18 | 0 | 4.53 | 4.33 | 4.42 | 4.39 | 5.01 | 4.61 | 4.40 |
| hsa-asg-13924 | hsa-asg-13924_st1 | 5.66 | 0 | 5.30 | 5.06 | 4.72 | 5.18 | 5.18 | 4.94 | 4.81 |
| hsa-asg-2093 | hsa-asg-2093_st1 | 6.37 | 100 | 5.98 | 5.64 | 5.80 | 5.77 | 5.99 | 5.71 | 5.62 |
| hsa-asg-6838 | hsa-asg-6838_st1 | 6.57 | 0 | 6.00 | 6.25 | 6.27 | 5.97 | 6.05 | 5.96 | 6.33 |
| hsa-asg-6951 | hsa-asg-6951_st2 | 7.76 | 100 | 7.27 | 7.36 | 7.25 | 7.31 | 7.59 | 7.37 | 7.42 |
| hsa-asg-8882 | hsa-asg-8882_st1 | 7.23 | 100 | 6.68 | 6.97 | 7.02 | 6.84 | 6.79 | 6.76 | 6.83 |
| hsa-asg-7271 | hsa-asg-7271_st1 | 5.57 | 0 | 5.36 | 5.10 | 5.21 | 5.26 | 5.20 | 5.21 | 5.22 |
| hsa-asg-13348 | hsa-asg-13348_st2 | 6.84 | 100 | 6.37 | 6.50 | 6.65 | 6.63 | 6.61 | 6.62 | 6.48 |
| hsa-asg-9386 | hsa-asg-9386_st2 | 9.26 | 100 | 9.53 | 9.37 | 9.52 | 9.63 | 9.60 | 9.58 | 9.74 |
| hsa-asg-504 | hsa-asg-504_st2 | 8.49 | 100 | 8.67 | 8.78 | 8.93 | 9.05 | 8.87 | 8.78 | 8.93 |
| hsa-asg-9185 | hsa-asg-9185_st2 | 7.89 | 100 | 8.29 | 8.33 | 8.28 | 8.29 | 8.08 | 8.21 | 8.36 |
| hsa-asg-10207 | hsa-asg-10207_st2 | 6.02 | 0 | 6.49 | 6.49 | 6.49 | 6.17 | 6.31 | 6.49 | 6.40 |
| hsa-cand109 | hsa-cand109_st1 | 6.79 | 100 | 7.04 | 7.23 | 7.20 | 7.26 | 7.12 | 7.35 | 7.13 |
| hsa-cand428 | hsa-cand428_st2 | 6.06 | 0 | 6.75 | 6.58 | 6.76 | 6.68 | 6.41 | 6.40 | 6.34 |
| hsa-asg-8391 | hsa-asg-8391_st1 | 5.07 | 0 | 5.52 | 5.70 | 5.73 | 5.43 | 5.59 | 5.28 | 5.81 |
| hsa-asg-4596 | hsa-asg-4596_st2 | 5.98 | 0 | 6.46 | 6.65 | 6.30 | 6.32 | 6.34 | 6.68 | 6.72 |
| hsa-asg-797 | hsa-asg-797_st2 | 4.80 | 0 | 5.33 | 5.36 | 5.13 | 5.43 | 5.38 | 5.14 | 5.48 |
| hsa-asg-1236 | hsa-asg-1236_st1 | 5.50 | 0 | 6.02 | 6.12 | 5.99 | 5.82 | 6.17 | 5.88 | 6.15 |
| hsa-asg-6371 | hsa-asg-6371_st2 | 8.39 | 100 | 8.78 | 8.84 | 8.81 | 9.39 | 9.00 | 8.87 | 8.93 |
| hsa-asg-8322 | hsa-asg-8322_st2 | 2.22 | 0 | 2.90 | 2.69 | 2.76 | 2.91 | 2.66 | 2.86 | 2.64 |
| hsa-asg-9271 | hsa-asg-9271_st2 | 7.35 | 100 | 7.99 | 7.90 | 7.51 | 8.07 | 7.91 | 8.04 | 8.13 |
| hsa-asg-3830 | hsa-asg-3830_st2 | 4.23 | 0 | 5.07 | 4.88 | 4.67 | 4.97 | 4.78 | 5.21 | 4.64 |
| hsa-asg-4814 | hsa-asg-4814_st1 | 5.63 | 0 | 6.08 | 6.20 | 6.36 | 6.50 | 6.67 | 5.94 | 6.46 |
| hsa-asg-826 | hsa-asg-826_st1 | 7.70 | 100 | 7.99 | 8.31 | 8.57 | 8.61 | 8.48 | 8.25 | 8.51 |
| hsa-asg-9883 | hsa-asg-9883_st1 | 6.06 | 0 | 6.46 | 6.66 | 7.13 | 6.75 | 7.04 | 6.63 | 6.84 |
| hsa-cand523 | hsa-cand523_st1 | 5.38 | 0 | 5.74 | 6.06 | 6.03 | 6.46 | 6.15 | 6.12 | 6.18 |
| hsa-asg-8641 | hsa-asg-8641_st1 | 4.29 | 0 | 4.80 | 4.88 | 5.15 | 5.29 | 5.14 | 4.71 | 5.33 |
| hsa-asg-11155 | hsa-asg-11155_st1 | 7.36 | 0 | 8.36 | 7.91 | 7.99 | 8.41 | 8.05 | 7.85 | 8.36 |
| hsa-asg-12885 | hsa-asg-12885_st1 | 4.86 | 0 | 5.67 | 5.90 | 5.76 | 5.65 | 5.46 | 5.52 | 5.53 |
| hsa-asg-11521 | hsa-asg-11521_st1 | 6.98 | 100 | 7.83 | 7.73 | 7.43 | 8.00 | 8.25 | 7.58 | 7.74 |
| hsa-asg-4200 | hsa-asg-4200_st1 | 4.20 | 0 | 4.88 | 4.79 | 5.21 | 5.08 | 5.45 | 4.66 | 5.07 |
| hsa-asg-9257 | hsa-asg-9257_st2 | 4.75 | 0 | 5.27 | 5.56 | 5.85 | 5.08 | 5.77 | 5.66 | 5.90 |
| hsa-asg-795 | hsa-asg-795_st2 | 4.93 | 0 | 5.85 | 6.20 | 5.93 | 5.45 | 5.82 | 5.63 | 5.50 |
| hsa-asg-5712 | hsa-asg-5712_st2 | 4.73 | 0 | 5.14 | 5.40 | 5.91 | 5.40 | 5.70 | 5.90 | 5.54 |
| hsa-asg-4691 | hsa-asg-4691_st1 | 5.18 | 0 | 6.15 | 6.38 | 5.70 | 5.86 | 5.94 | 6.05 | 6.15 |
| hsa-asg-5061 | hsa-asg-5061_st1 | 6.16 | 0 | 6.78 | 7.18 | 7.10 | 6.93 | 7.18 | 6.82 | 7.21 |
| hsa-asg-1689 | hsa-asg-1689_st2 | 5.14 | 0 | 5.89 | 5.83 | 5.93 | 6.19 | 6.11 | 6.37 | 6.57 |
| hsa-cand190 | hsa-cand190_st1 | 4.02 | 0 | 4.62 | 5.22 | 5.31 | 5.36 | 4.51 | 5.02 | 5.02 |
| hsa-asg-13881 | hsa-asg-13881_st1 | 4.41 | 0 | 4.84 | 5.70 | 5.64 | 5.21 | 5.59 | 5.55 | 5.33 |
| hsa-asg-9852 | hsa-asg-9852_st1 | 4.95 | 0 | 5.55 | 6.43 | 6.33 | 5.99 | 6.19 | 6.05 | 5.82 |
| hsa-asg-4557 | hsa-asg-4557_st2 | 6.46 | 100 | 7.15 | 7.23 | 7.47 | 7.60 | 8.20 | 7.32 | 7.98 |
| hsa-asg-13230 | hsa-asg-13230_st2 | 5.71 | 0 | 7.14 | 7.01 | 6.73 | 6.78 | 6.78 | 6.67 | 6.76 |
| hsa-asg-6247 | hsa-asg-6247_st1 | 8.70 | 100 | 9.73 | 9.90 | 10.1 | 9.91 | 9.24 | 9.80 | 102 |
| hsa-asg-12460 | hsa-asg-12460_st2 | 6.68 | 100 | 7.45 | 8.42 | 8.20 | 7.41 | 8.16 | 7.48 | 7.69 |
| hsa-asg-13693 | hsa-asg-13693_st2 | 4.82 | 0 | 5.80 | 6.12 | 6.29 | 5.92 | 5.95 | 6.08 | 6.24 |
| hsa-miR157 | hsa-miR157_st2 | 7.67 | 100 | 8.88 | 8.62 | 8.89 | 8.88 | 8.24 | 9.27 | 9.72 |
| hsa-asg-3360 | hsa-asg-3360_st2 | 5.63 | 0 | 7.37 | 6.62 | 6.68 | 6.53 | 6.61 | 7.48 | 7.28 |
| hsa-asg-7009 | hsa-asg-7009_st1 | 4.86 | 0 | 5.71 | 6.22 | 7.15 | 5.77 | 6.28 | 5.90 | 6.18 |
| hsa-asg-11310 | hsa-asg-11310_st2 | 4.95 | 0 | 6.06 | 6.48 | 6.91 | 5.58 | 6.30 | 6.32 | 6.18 |
| hsa-asg-6949 | hsa-asg-6949_st1 | 4.73 | 0 | 5.85 | 6.08 | 6.31 | 5.55 | 6.37 | 5.92 | 6.27 |
| hsa-asg-6717 | hsa-asg-6717_st2 | 5.61 | 0 | 6.20 | 7.25 | 7.51 | 6.52 | 7.25 | 6.72 | 7.24 |
| hsa-asg-562 | hsa-asg-562_st1 | 8.69 | 100 | 10.1 | 9.55 | 10.2 | 10.1 | 9.74 | 10.3 | 10.7 |
| hsa-asg-13248 | hsa-asg-13248_st1 | 7.68 | 100 | 9.94 | 8.87 | 8.61 | 9.18 | 8.89 | 8.86 | 10.0 |
| hsa-asg-13260 | hsa-asg-13260_st1 | 6.77 | 100 | 8.64 | 8.29 | 8.56 | 7.70 | 8.18 | 8.07 | 8.66 |
| hsa-asg-6879 | hsa-asg-6879_st1 | 4.20 | 0 | 5.60 | 5.75 | 5.95 | 5.48 | 5.71 | 5.49 | 6.18 |
| hsa-asg-10883 | hsa-asg-10883_st1 | 5.11 | 0 | 6.32 | 7.51 | 7.23 | 6.34 | 7.03 | 7.09 | 7.35 |
| hsa-asg-10861 | hsa-asg-10861_st2 | 3.95 | 0 | 5.62 | 6.28 | 6.43 | 5.59 | 6.32 | 5.55 | 5.65 |
| hsa-asg-13937 | hsa-asg-13937_st1 | 6.80 | 100 | 8.27 | 9.59 | 9.28 | 8.05 | 8.75 | 8.88 | 9.64 |
| hsa-asg-7532 | hsa-asg-7532_st2 | 3.49 | 0 | 4.62 | 5.64 | 6.39 | 4.84 | 6.51 | 6.05 | 5.81 |
| hsa-asg-13304 | hsa-asg-13304_st2 | 4.29 | 0 | 6.15 | 6.40 | 7.12 | 6.29 | 6.82 | 6.28 | 7.15 |
| hsa-asg-7074 | hsa-asg-7074_st1 | 7.89 | 100 | 9.87 | 10.3 | 10.5 | 9.80 | 10.3 | 10.3 | 10.7 |
| hsa-asg-13279 | hsa-asg-13279_st1 | 4.77 | 0 | 8.09 | 7.42 | 7.28 | 7.36 | 7.25 | 6.90 | 7.66 |
| hsa-asg-13237 | hsa-asg-13237_st1 | 3.75 | 0 | 7.44 | 6.96 | 7.26 | 6.50 | 7.57 | 6.95 | 7.53 |
| hsa-asg-870 | hsa-asg-870_st1 | 1.58 | 0 | 4.37 | 6.85 | 7.49 | 5.18 | 6.42 | 6.05 | 6.50 |
| hsa-miR-29b | hsa-asg-14229_st2 | 9.02 | 100 | 11.3 | 11.0 | 10.7 | 10.9 | 10.6 | 10.2 | 11.1 |
| hsa-miR-421 | hsa-asg-5033_st2 | 9.32 | 100 | 7.09 | 6.48 | 6.07 | 7.53 | 6.19 | 6.64 | 7.66 |
| hsa-miR-592 | hsa-asg-4400_st1 | 6.78 | 100 | 3.20 | 2.69 | 2.75 | 3.35 | 3.26 | 2.86 | 3.42 |

| | LNneg | | | LNpos1A vs LNneg | | |
|---|---|---|---|---|---|---|
| MicroRNA | Mean | SD | % | ttest | Log2Diff | FC |
| hsa-miR-211 | 4.07 | 1.18 | 0.0 | 1.36E−03 | 7.09 | 136 |
| hsa-miR-375 | 4.27 | 0.68 | 0.0 | 1.04E−04 | 6.52 | 91 |
| hsa-miR-203 | 5.84 | 0.71 | 28. | 2.99E−04 | 5.64 | 50 |
| hsa-miR-200b | 6.95 | 0.67 | 100 | 2.42E−04 | 5.54 | 46 |
| hsa-miR-200c | 7.80 | 0.79 | 100 | 7.19E−04 | 5.38 | 41 |
| hsa-miR-509 | 6.44 | 0.84 | 85. | 1.21E−03 | 5.18 | 36 |
| hsa-miR-513 | 5.35 | 1.22 | 14. | 9.74E−03 | 4.85 | 28 |
| hsa-miR-429 | 2.98 | 0.33 | 0.0 | 1.52E−05 | 4.49 | 22 |
| hsa-miR-767-5p | 2.97 | 0.55 | 0.0 | 2.71E−04 | 4.47 | 22 |
| hsa-miR-187 | 3.68 | 0.62 | 0.0 | 8.09E−04 | 4.13 | 17 |
| hsa-miR-592 | 2.99 | 0.47 | 0.0 | 2.41E−04 | 3.90 | 15 |
| hsa-miR-204 | 5.87 | 1.06 | 71. | 1.36E−02 | 3.90 | 14 |
| hsa-miR-105 | 3.55 | 0.58 | 0.0 | 1.73E−03 | 3.31 | 9.9 |
| hsa-miR-132 | 5.56 | 1.13 | 0.0 | 3.50E−02 | 3.28 | 9.7 |
| hsa-miR-200a | 5.49 | 0.58 | 57. | 1.91E−03 | 3.26 | 9.6 |
| hsa-miR-605 | 3.08 | 0.38 | 0.0 | 2.19E−04 | 3.24 | 9.4 |
| hsa-miR-215 | 6.97 | 0.57 | 100 | 2.59E−03 | 3.01 | 8.0 |
| hsa-miR-183 | 6.31 | 0.51 | 85. | 1.64E−03 | 2.95 | 7.7 |
| hsa-miR-196b | 7.18 | 0.94 | 100 | 2.72E−02 | 2.91 | 7.5 |
| hsa-miR-508 | 6.61 | 0.47 | 100 | 1.20E−03 | 2.89 | 7.4 |
| hsa-miR-493-5p | 4.29 | 0.91 | 28 | 2.79E−02 | 2.81 | 7.0 |
| hsa-miR-194 | 9.59 | 0.64 | 100 | 7.59E−03 | 2.69 | 6.4 |
| hsa-miR-421 | 7.45 | 0.76 | 100 | 1.75E−02 | 2.63 | 6.2 |
| hsa-miR-192 | 10.59 | 0.61 | 100 | 8.46E−03 | 2.53 | 5.8 |
| hsa-miR-1 | 9.58 | 0.84 | 100 | 4.74E−02 | 2.24 | 4.7 |
| hsa-miR-506 | 6.48 | 0.41 | 100 | 2.37E−03 | 2.22 | 4.7 |
| hsa-miR-584 | 5.47 | 0.42 | 14 | 2.81E−03 | 2.20 | 4.6 |
| hsa-miR-522 | 4.33 | 0.64 | 0.0 | 1.86E−02 | 2.20 | 4.6 |
| hsa-miR-510 | 5.03 | 0.60 | 14 | 1.58E−02 | 2.12 | 4.3 |
| hsa-miR-576 | 2.87 | 0.39 | 0.0 | 2.68E−03 | 2.04 | 4.1 |
| hsa-miR-495 | 4.88 | 0.47 | 28 | 9.44E−03 | 1.89 | 3.7 |
| hsa-miR-182 | 8.62 | 0.49 | 100 | 1.58E−02 | 1.75 | 3.4 |
| hsa-miR-514 | 2.99 | 0.07 | 0.0 | 5.89E−07 | 1.59 | 3.0 |
| hsa-miR-450 | 3.85 | 0.58 | 0.0 | 4.45E−02 | 1.56 | 2.9 |
| hsa-miR-382 | 6.52 | 0.48 | 57 | 3.56E−02 | 1.38 | 2.6 |
| hsa-miR-10a | 11.10 | 0.37 | 100 | 4.28E−02 | 1.02 | 2.0 |
| hsa-miR-30d | 12.31 | 0.27 | 100 | 2.87E−02 | 0.82 | 1.8 |
| hsa-miR-30a-5p | 11.71 | 0.25 | 100 | 2.63E−02 | 0.79 | 1.7 |
| hsa-miR-27b | 12.15 | 0.12 | 100 | 2.21E−03 | 0.66 | 1.6 |
| hsa-miR-23b | 13.24 | 0.15 | 100 | 1.71E−02 | 0.51 | 1.4 |
| hsa-miR-21 | 13.30 | 0.17 | 100 | 3.92E−02 | 0.47 | 1.4 |
| hsa-let-7e | 12.20 | 0.14 | 100 | 2.64E−02 | 0.44 | 1.4 |
| hsa-miR-155 | 13.72 | 0.14 | 100 | 1.54E−02 | −0.52 | 1.4 |
| hsa-miR-195 | 12.86 | 0.15 | 100 | 4.25E−03 | −0.71 | 1.6 |
| hsa-miR-564 | 6.90 | 0.35 | 100 | 2.89E−02 | −1.07 | 2.1 |
| hsa-miR-34a | 8.10 | 0.31 | 100 | 1.59E−02 | −1.11 | 2.2 |
| hsa-miR-22 | 11.56 | 0.47 | 100 | 4.77E−02 | −1.24 | 2.4 |
| hsa-miR-15a | 11.71 | 0.35 | 100 | 1.46E−02 | −1.25 | 2.4 |
| hsa-miR-342 | 13.55 | 0.19 | 100 | 6.27E−04 | −1.31 | 2.5 |
| hsa-miR-186 | 7.78 | 0.50 | 100 | 3.42E−02 | −1.45 | 2.7 |
| hsa-miR-142-3p | 5.20 | 0.44 | 14 | 7.51E−03 | −1.86 | 3.6 |
| hsa-miR-486 | 7.99 | 0.49 | 100 | 1.10E−02 | −1.89 | 3.7 |
| hsa-miR-29b | 10.85 | 0.34 | 100 | 1.86E−03 | −1.90 | 3.7 |
| hsa-miR-29c | 10.42 | 0.51 | 100 | 1.24E−02 | −1.92 | 3.8 |
| hsa-miR-199a | 10.17 | 0.33 | 100 | 1.49E−03 | −1.96 | 3.9 |
| hsa-miR-497 | 7.61 | 0.28 | 57 | 5.08E−04 | −2.06 | 4.2 |
| hsa-miR-598 | 7.11 | 0.70 | 85 | 2.84E−02 | −2.16 | 4.5 |
| hsa-asg-5638 | 3.56 | 0.77 | 0.0 | 1.68E−03 | 4.43 | 21 |
| hsa-asg-1296 | 3.01 | 0.22 | 0.0 | 6.35E−06 | 3.40 | 10 |
| hsa-asg-7637 | 3.87 | 0.31 | 0.0 | 5.29E−05 | 3.38 | 10 |
| hsa-asg-4803 | 4.34 | 0.86 | 0.0 | 1.45E−02 | 3.14 | 8.8 |
| hsa-asg-11338 | 3.96 | 0.36 | 0.0 | 3.02E−04 | 2.83 | 7.1 |
| hsa-asg-1519 | 6.48 | 0.67 | 100 | 8.73E−03 | 2.74 | 6.7 |
| hsa-asg-14208 | 4.38 | 0.67 | 0.0 | 9.15E−03 | 2.72 | 6.6 |
| hsa-asg-9514 | 3.05 | 0.33 | 0.0 | 7.63E−04 | 2.20 | 4.6 |
| hsa-asg-247 | 5.35 | 0.24 | 0.0 | 1.46E−04 | 2.19 | 4.6 |
| hsa-asg-11361 | 3.36 | 0.28 | 0.0 | 4.74E−04 | 2.08 | 4.2 |
| hsa-asg-1268 | 4.22 | 0.59 | 0.0 | 1.96E−02 | 1.98 | 4.0 |
| hsa-asg-9980 | 4.28 | 0.41 | 0.0 | 4.02E−03 | 1.96 | 3.9 |
| hsa-asg-9987 | 5.39 | 0.40 | 28 | 4.49E−03 | 1.91 | 3.8 |
| hsa-asg-2381 | 6.01 | 0.33 | 85 | 1.97E−03 | 1.86 | 3.6 |
| hsa-asg-3711 | 5.40 | 0.54 | 0.0 | 2.16E−02 | 1.77 | 3.4 |
| hsa-cand660 | 2.83 | 0.35 | 0.0 | 4.09E−03 | 1.70 | 3.2 |
| hsa-asg-5998 | 6.37 | 0.58 | 71 | 3.70E−02 | 1.64 | 3.1 |
| hsa-asg-4460 | 5.05 | 0.38 | 0.0 | 9.70E−03 | 1.51 | 2.8 |
| hsa-asg-9723 | 2.87 | 0.34 | 0.0 | 6.18E−03 | 1.48 | 2.8 |
| hsa-asg-6457 | 5.01 | 0.50 | 0.0 | 3.53E−02 | 1.44 | 2.7 |
| hsa-asg-2261 | 3.29 | 0.33 | 0.0 | 7.40E−03 | 1.42 | 2.7 |
| hsa-asg-8428 | 2.97 | 0.44 | 0.0 | 2.66E−02 | 1.39 | 2.6 |
| hsa-asg-11380 | 3.09 | 0.34 | 0.0 | 9.30E−03 | 1.38 | 2.6 |
| hsa-asg-7423 | 5.73 | 0.51 | 28. | 4.58E−02 | 1.36 | 2.6 |
| hsa-asg-1616 | 7.59 | 0.38 | 100 | 1.54E−02 | 1.35 | 2.5 |
| hsa-asg-3341 | 4.61 | 0.32 | 0.0 | 1.38E−02 | 1.19 | 2.3 |
| hsa-asg-12666 | 5.37 | 0.38 | 28 | 2.60E−02 | 1.18 | 2.3 |
| hsa-asg-7471 | 6.03 | 0.21 | 71 | 2.11E−03 | 1.16 | 2.2 |
| hsa-asg-4401 | 6.14 | 0.37 | 100 | 3.60E−02 | 1.06 | 2.1 |
| hsa-asg-2500 | 5.77 | 0.31 | 14 | 2.01E−02 | 1.04 | 2.1 |
| hsa-asg-1124 | 4.36 | 0.28 | 0.0 | 1.35E−02 | 1.02 | 2.0 |
| hsa-asg-13798 | 4.93 | 0.30 | 0.0 | 2.11E−02 | 0.99 | 2.0 |
| hsa-asg-3798 | 5.44 | 0.30 | 0.0 | 2.19E−02 | 0.97 | 2.0 |
| hsa-asg-13997 | 2.82 | 0.34 | 0.0 | 3.81E−02 | 0.97 | 2.0 |
| hsa-asg-4477 | 4.83 | 0.29 | 0.0 | 2.22E−02 | 0.96 | 1.9 |
| hsa-asg-14186 | 5.01 | 0.28 | 28 | 2.97E−02 | 0.85 | 1.8 |
| hsa-asg-11579 | 5.57 | 0.30 | 85 | 4.34E−02 | 0.83 | 1.8 |
| hsa-asg-12271 | 4.55 | 0.29 | 0.0 | 4.74E−02 | 0.77 | 1.7 |
| hsa-asg-6616 | 6.07 | 0.26 | 85 | 3.45E−02 | 0.76 | 1.7 |
| hsa-asg-1301 | 4.51 | 0.25 | 0.0 | 3.35E−02 | 0.73 | 1.7 |
| hsa-asg-841 | 4.87 | 0.17 | 0.0 | 7.60E−03 | 0.73 | 1.7 |
| hsa-asg-4033 | 6.15 | 0.21 | 57 | 1.97E−02 | 0.70 | 1.6 |
| hsa-asg-4030 | 4.53 | 0.23 | 14 | 4.10E−02 | 0.65 | 1.6 |
| hsa-asg-13924 | 5.03 | 0.21 | 0.0 | 3.03E−02 | 0.63 | 1.6 |
| hsa-asg-2093 | 5.79 | 0.15 | 57 | 1.07E−02 | 0.58 | 1.5 |
| hsa-asg-6838 | 6.12 | 0.16 | 0.0 | 3.54E−02 | 0.45 | 1.4 |
| hsa-asg-6951 | 7.37 | 0.12 | 100 | 1.97E−02 | 0.39 | 1.3 |
| hsa-asg-8882 | 6.84 | 0.12 | 100 | 2.17E−02 | 0.39 | 1.3 |
| hsa-asg-7271 | 5.22 | 0.08 | 14 | 5.51E−03 | 0.34 | 1.3 |
| hsa-asg-13348 | 6.55 | 0.11 | 100 | 4.45E−02 | 0.29 | 1.2 |
| hsa-asg-9386 | 9.57 | 0.11 | 100 | 4.82E−02 | −0.30 | 1.2 |
| hsa-asg-504 | 8.86 | 0.13 | 100 | 3.38E−02 | −0.37 | 1.3 |
| hsa-asg-9185 | 8.26 | 0.09 | 100 | 9.53E−03 | −0.38 | 1.3 |
| hsa-asg-10207 | 6.41 | 0.12 | 28 | 2.90E−02 | −0.38 | 1.3 |
| hsa-cand109 | 7.19 | 0.10 | 100 | 1.07E−02 | −0.40 | 1.3 |
| hsa-cand428 | 6.56 | 0.18 | 42 | 3.94E−02 | −0.50 | 1.4 |
| hsa-asg-8391 | 5.58 | 0.19 | 14 | 4.29E−02 | −0.51 | 1.4 |
| hsa-asg-4596 | 6.50 | 0.19 | 85 | 4.19E−02 | −0.51 | 1.4 |
| hsa-asg-797 | 5.32 | 0.14 | 14 | 1.13E−02 | −0.52 | 1.4 |
| hsa-asg-1236 | 6.02 | 0.13 | 42 | 1.08E−02 | −0.52 | 1.4 |
| hsa-asg-6371 | 8.95 | 0.21 | 100 | 4.73E−02 | −0.55 | 1.5 |
| hsa-asg-8322 | 2.77 | 0.12 | 0.0 | 4.27E−03 | −0.56 | 1.5 |
| hsa-asg-9271 | 7.94 | 0.20 | 100 | 3.54E−02 | −0.59 | 1.5 |
| hsa-asg-3830 | 4.89 | 0.21 | 28 | 2.58E−02 | −0.66 | 1.6 |
| hsa-asg-4814 | 6.31 | 0.25 | 71 | 4.69E−02 | −0.68 | 1.6 |
| hsa-asg-826 | 8.39 | 0.22 | 100 | 2.61E−02 | −0.69 | 1.6 |
| hsa-asg-9883 | 6.79 | 0.23 | 57 | 2.79E−02 | −0.72 | 1.6 |
| hsa-cand523 | 6.11 | 0.22 | 42 | 1.97E−02 | −0.73 | 1.7 |
| hsa-asg-8641 | 5.04 | 0.24 | 0.0 | 2.81E−02 | −0.75 | 1.7 |
| hsa-asg-11155 | 8.13 | 0.24 | 100 | 2.32E−02 | −0.77 | 1.7 |
| hsa-asg-12885 | 5.64 | 0.15 | 57 | 3.22E−03 | −0.78 | 1.7 |
| hsa-asg-11521 | 7.80 | 0.27 | 100 | 3.08E−02 | −0.82 | 1.8 |
| hsa-asg-4200 | 5.02 | 0.27 | 0.0 | 2.73E−02 | −0.82 | 1.8 |
| hsa-asg-9257 | 5.58 | 0.31 | 28 | 4.38E−02 | −0.83 | 1.8 |
| hsa-asg-795 | 5.77 | 0.26 | 57 | 2.44E−02 | −0.84 | 1.8 |
| hsa-asg-5712 | 5.57 | 0.28 | 0.0 | 3.25E−02 | −0.84 | 1.8 |
| hsa-asg-4691 | 6.03 | 0.22 | 0.0 | 1.10E−02 | −0.85 | 1.8 |
| hsa-asg-5061 | 7.03 | 0.18 | 100 | 4.21E−03 | −0.87 | 1.8 |
| hsa-asg-1689 | 6.12 | 0.27 | 28 | 1.49E−02 | −0.98 | 2.0 |
| hsa-cand190 | 5.01 | 0.33 | 14 | 3.20E−02 | −0.99 | 2.0 |
| hsa-asg-13881 | 5.41 | 0.31 | 0.0 | 2.24E−02 | −1.00 | 2.0 |
| hsa-asg-9852 | 6.05 | 0.30 | 57 | 1.46E−02 | −1.10 | 2.1 |
| hsa-asg-4557 | 7.57 | 0.40 | 100 | 3.95E−02 | −1.11 | 2.2 |
| hsa-asg-13230 | 6.84 | 0.17 | 100 | 8.05E−04 | −1.13 | 2.2 |
| hsa-asg-6247 | 9.85 | 0.32 | 100 | 1.51E−02 | −1.15 | 2.2 |
| hsa-asg-12460 | 7.83 | 0.42 | 100 | 4.25E−02 | −1.15 | 2.2 |
| hsa-asg-13693 | 6.06 | 0.18 | 42 | 6.03E−04 | −1.24 | 2.4 |
| hsa-miR157 | 8.93 | 0.47 | 100 | 4.56E−02 | −1.26 | 2.4 |
| hsa-asg-3360 | 6.94 | 0.42 | 100 | 2.62E−02 | −1.30 | 2.5 |
| hsa-asg-7009 | 6.17 | 0.49 | 28 | 4.56E−02 | −1.31 | 2.5 |
| hsa-asg-11310 | 6.26 | 0.40 | 100 | 2.30E−02 | −1.31 | 2.5 |
| hsa-asg-6949 | 6.05 | 0.30 | 28 | 5.91E−03 | −1.32 | 2.5 |
| hsa-asg-6717 | 6.96 | 0.48 | 71 | 3.92E−02 | −1.35 | 2.5 |
| hsa-asg-562 | 10.13 | 0.39 | 100 | 1.41E−02 | −1.44 | 2.7 |
| hsa-asg-13248 | 9.20 | 0.58 | 100 | 4.88E−02 | −1.52 | 2.9 |
| hsa-asg-13260 | 8.30 | 0.35 | 100 | 6.54E−03 | −1.53 | 2.9 |
| hsa-asg-6879 | 5.74 | 0.26 | 42. | 1.35E−03 | −1.54 | 2.9 |
| hsa-asg-10883 | 6.98 | 0.47 | 100 | 9.81E−03 | −1.88 | 3.7 |
| hsa-asg-10861 | 5.92 | 0.40 | 14 | 3.53E−03 | −1.97 | 3.9 |
| hsa-asg-13937 | 8.92 | 0.62 | 100 | 1.86E−02 | −2.12 | 4.4 |
| hsa-asg-7532 | 5.70 | 0.73 | 57 | 2.93E−02 | −2.21 | 4.6 |
| hsa-asg-13304 | 6.60 | 0.42 | 85 | 2.16E−03 | −2.31 | 5.0 |
| hsa-asg-7074 | 10.27 | 0.34 | 100 | 5.77E−04 | −2.38 | 5.2 |
| hsa-asg-13279 | 7.42 | 0.37 | 100 | 5.49E−04 | −2.65 | 6.3 |
| hsa-asg-13237 | 7.17 | 0.39 | 100 | 1.78E−04 | −3.42 | 10 |
| hsa-asg-870 | 6.12 | 1.05 | 42 | 6.67E−03 | −4.54 | 23 |
| hsa-miR-29b | 10.87 | 0.36 | 100 | 2.79E−03 | −1.85 | 3.6 |
| hsa-miR-421 | 6.81 | 0.63 | 85 | 9.87E−03 | 2.51 | 5.7 |
| hsa-miR-592 | 3.07 | 0.30 | 0.0 | 2.50E−05 | 3.71 | 13 |

SD, standard deviation;
%, percentage of samples expressing miRNA above background levels;
Log2Diff, difference in VSN-transformed expression between LNpos1A and LNneg samples.

[0264] A comparison of miRNA expression between LNneg and LNposB (LNpos2B and LN pos3B) samples is shown in Table 12. Thirty six human miRNAs (13 verified and 23 predicted) were determined to have significantly higher average expression levels in LNposB samples than in LNneg (log 2Diff(LNposB vs LNneg)≧1, t-test(LNposB vs LNneg)<0.05). Among the verified miRNAs, three (hsa-miR-211, -513, and -509) were expressed at levels between 25- and 52-fold higher in LNposB than in LNneg, and four miRNAs (hsa-miR-584, -204, -132, and -506) were expressed at levels between 5- and 8-fold higher in LNposB samples. In addition, 85 miRNAs were expressed at levels at least 2-fold lower in LNposB samples. Among these, five miRNAs (hsa-miR-31, -1, -335, -85, and -192) had average expression levels between 15- and 25-fold lower in LNposB samples than in LNneg samples (Table 12). Among the 23 differentially expressed predicted miRNAs, hsa-asg-5638_st2 was expressed at levels at least 18-fold higher in LNposB than in LNneg, and four miRNAs (hsa-asg-5630_st2, -11338_st2, -9186_st1, and -1946_st1) were expressed at levels between 5- and 8-fold higher in LNposB than in LNneg samples (Table 12).

TABLE 12
MicroRNAs Differentially Expressed Between Cancer-Positive Lymph Node Group B Samples
(LNpos2B, -3B, and -4B) and Cancer-Negative Lymph Node Samples (LNneg1-7) from Melanoma Patients.

| | Probe | LNposB | | | | | LNneg | | | | | | |
|---|---|---|---|---|---|---|---|---|---|---|---|---|---|
| MicroRNA | ID | 2 | 3 | Mean | SD | % | 1 | 2 | 3 | 4 | 5 | 6 | 7 |
| hsa-miR-211 | hsa-miR-211_st1 | 10.07 | 9.48 | 9.77 | 0.41 | 100 | 3.2 | 5.8 | 2.6 | 4.6 | 5.2 | 4.0 | 3.0 |
| hsa-miR-513 | hsa-miR-513_st1 | 10.97 | 9.54 | 10.25 | 1.02 | 100 | 3.0 | 7.1 | 5.5 | 5.2 | 5.4 | 5.5 | 5.8 |
| hsa-miR-509 | hsa-miR-509_st2 | 11.96 | 10.54 | 11.25 | 1.01 | 100 | 6.1 | 8.0 | 6.0 | 5.5 | 7.0 | 6.3 | 6.2 |
| hsa-miR-584 | hsa-miR-584_st2 | 8.42 | 8.37 | 8.40 | 0.04 | 100 | 4.8 | 5.5 | 5.4 | 5.1 | 5.7 | 5.6 | 6.1 |
| hsa-miR-204 | hsa-miR-204_st2 | 7.20 | 9.89 | 8.55 | 1.90 | 100 | 3.8 | 6.0 | 5.3 | 7.0 | 6.4 | 6.1 | 6.4 |
| hsa-miR-132 | hsa-miR-132_st1 | 8.48 | 7.63 | 8.06 | 0.61 | 50 | 6.6 | 4.4 | 4.5 | 7.4 | 5.4 | 4.8 | 5.9 |
| hsa-miR-506 | hsa-miR-506_st2 | 9.53 | 8.41 | 8.97 | 0.79 | 100 | 6.1 | 7.1 | 6.6 | 6.0 | 6.8 | 6.7 | 6.1 |
| hsa-miR-508 | hsa-miR-508_st1 | 9.19 | 8.30 | 8.75 | 0.62 | 100 | 6.1 | 7.3 | 7.1 | 6.5 | 6.7 | 6.5 | 6.2 |
| hsa-miR-767-5p | hsa-asg-558_st1 | 5.75 | 4.42 | 5.09 | 0.94 | 0 | 2.7 | 3.7 | 2.8 | 2.8 | 2.7 | 2.4 | 3.8 |
| hsa-miR-105 | hsa-miR-105_st1 | 6.09 | 4.57 | 5.33 | 1.08 | 0 | 3.0 | 3.3 | 3.6 | 3.6 | 2.8 | 4.3 | 4.3 |
| hsa-miR-450 | hsa-miR-450_st2 | 4.52 | 5.79 | 5.16 | 0.90 | 50 | 3.3 | 4.4 | 3.0 | 4.5 | 3.9 | 3.6 | 4.3 |
| hsa-miR-514 | hsa-miR-514_st1 | 4.40 | 3.98 | 4.19 | 0.30 | 0 | 3.0 | 3.1 | 2.9 | 2.9 | 3.0 | 3.0 | 3.0 |
| hsa-miR-503 | hsa-miR-503_st1 | 7.57 | 7.87 | 7.72 | 0.21 | 100 | 5.5 | 6.4 | 6.4 | 7.1 | 6.4 | 6.8 | 7.2 |
| hsa-miR-542-3p | hsa-miR-542-3p_st1 | 6.48 | 6.69 | 6.59 | 0.15 | 100 | 5.4 | 5.8 | 6.0 | 6.1 | 5.6 | 5.6 | 6.2 |
| hsa-miR-638 | hsa-miR-638_st2 | 12.81 | 13.14 | 12.97 | 0.24 | 100 | 12.7 | 12.7 | 12.7 | 12.8 | 12.8 | 12.7 | 12.7 |
| hsa-miR-26b | hsa-miR-26b_st1 | 11.91 | 12.00 | 11.96 | 0.06 | 100 | 12.4 | 12.7 | 12.6 | 12.3 | 12.5 | 12.1 | 12.4 |
| hsa-miR-221 | hsa-miR-221_st1 | 12.46 | 11.19 | 11.82 | 0.90 | 100 | 12.8 | 12.6 | 12.7 | 12.4 | 12.4 | 12.5 | 12.9 |
| hsa-let-7i | hsa-let-7i_st1 | 12.60 | 12.49 | 12.54 | 0.08 | 100 | 13.6 | 13.5 | 13.8 | 13.3 | 13.5 | 13.3 | 13.5 |
| hsa-let-7b | hsa-let-7b_st2 | 12.79 | 12.69 | 12.74 | 0.07 | 100 | 13.5 | 13.7 | 13.9 | 13.6 | 14.1 | 13.5 | 13.5 |
| hsa-miR-125b | hsa-miR-125b_st1 | 11.22 | 12.43 | 11.83 | 0.86 | 100 | 12.7 | 12.8 | 12.8 | 12.8 | 13.2 | 12.5 | 12.7 |
| hsa-miR-20a | hsa-miR-20a_st2 | 10.66 | 11.58 | 11.12 | 0.65 | 100 | 12.5 | 12.1 | 11.7 | 12.0 | 11.6 | 12.4 | 12.7 |
| hsa-miR-93 | hsa-miR-93_st2 | 10.10 | 9.63 | 9.86 | 0.33 | 100 | 11.0 | 10.7 | 10.7 | 10.5 | 10.5 | 11.4 | 11.6 |
| hsa-miR-141 | hsa-miR-141_st1 | 3.78 | 3.98 | 3.88 | 0.14 | 0 | 5.1 | 4.8 | 4.2 | 5.2 | 5.0 | 4.5 | 5.6 |
| hsa-miR-128b | hsa-miR-128b_st1 | 9.53 | 9.86 | 9.70 | 0.23 | 100 | 11.3 | 10.6 | 10.4 | 10.7 | 10.6 | 10.9 | 11.3 |
| hsa-miR-652 | hsa-miR-652_st1 | 8.15 | 7.62 | 7.88 | 0.37 | 50 | 8.2 | 9.1 | 9.0 | 8.6 | 9.1 | 9.3 | 9.7 |
| hsa-miR-27a | hsa-miR-27a_st2 | 10.16 | 10.34 | 10.25 | 0.13 | 100 | 10.8 | 11.5 | 11.4 | 11.4 | 11.2 | 11.5 | 11.8 |
| hsa-miR-574 | hsa-miR-574_st1 | 6.95 | 7.16 | 7.06 | 0.14 | 100 | 7.6 | 7.9 | 8.7 | 7.3 | 8.7 | 8.6 | 8.5 |
| hsa-miR-146b | hsa-miR-146b_st1 | 11.40 | 11.61 | 11.50 | 0.15 | 100 | 11.7 | 12.9 | 12.9 | 12.6 | 12.9 | 12.7 | 12.8 |
| hsa-miR-299-5p | hsa-miR-299-5p_st2 | 3.02 | 3.63 | 3.33 | 0.43 | 0 | 3.8 | 4.3 | 3.9 | 4.9 | 5.0 | 4.5 | 4.9 |
| hsa-miR-214 | hsa-miR-214_st1 | 7.18 | 7.51 | 7.35 | 0.23 | 0 | 7.7 | 8.5 | 8.6 | 8.3 | 9.3 | 8.6 | 8.5 |
| hsa-miR-128a | hsa-miR-128a_st2 | 9.10 | 9.49 | 9.30 | 0.27 | 100 | 11.0 | 10.3 | 10.0 | 10.5 | 10.2 | 10.5 | 10.9 |
| hsa-miR-185 | hsa-miR-185_st2 | 9.01 | 8.45 | 8.73 | 0.39 | 100 | 9.5 | 9.6 | 9.8 | 9.5 | 9.7 | 10.6 | 10.8 |
| hsa-miR-29a | hsa-miR-29a_st2 | 11.92 | 10.80 | 11.36 | 0.79 | 100 | 12.7 | 12.8 | 13.1 | 12.3 | 12.6 | 12.3 | 12.6 |
| hsa-miR-365 | hsa-miR-365_st1 | 4.64 | 5.08 | 4.86 | 0.31 | 0 | 5.3 | 5.9 | 6.3 | 6.6 | 6.6 | 5.5 | 6.6 |
| hsa-miR-628 | hsa-miR-628_st2 | 6.02 | 5.86 | 5.94 | 0.11 | 50 | 7.7 | 6.6 | 6.4 | 7.7 | 6.8 | 7.3 | 7.9 |
| hsa-miR-24 | hsa-miR-24_st1 | 11.97 | 11.89 | 11.93 | 0.05 | 100 | 12.7 | 13.3 | 13.2 | 13.1 | 13.4 | 13.4 | 13.4 |
| hsa-miR-191 | hsa-miR-191_st2 | 12.13 | 11.97 | 12.05 | 0.11 | 100 | 13.0 | 13.4 | 13.6 | 13.2 | 13.5 | 13.4 | 13.4 |
| hsa-miR-339 | hsa-miR-339_st1 | 5.42 | 5.37 | 5.40 | 0.03 | 0 | 7.1 | 6.6 | 6.4 | 5.9 | 6.7 | 6.9 | 7.2 |
| hsa-miR-551b | hsa-miR-551b_st1 | 2.64 | 2.80 | 2.72 | 0.11 | 0 | 3.8 | 3.4 | 3.8 | 3.9 | 4.3 | 4.7 | 4.3 |
| hsa-miR-30a-3p | hsa-miR-30a-3p_st1 | 6.67 | 8.10 | 7.38 | 1.01 | 100 | 7.9 | 9.2 | 8.9 | 8.8 | 9.4 | 8.0 | 8.7 |
| hsa-miR-103 | hsa-miR-103_st1 | 11.67 | 11.40 | 11.54 | 0.19 | 100 | 12.6 | 12.8 | 13.0 | 12.5 | 12.8 | 13.1 | 13.1 |
| hsa-miR-130b | hsa-miR-130b_st1 | 6.29 | 7.28 | 6.78 | 0.70 | 100 | 7.5 | 8.0 | 8.5 | 7.4 | 7.8 | 8.6 | 9.0 |
| hsa-miR-107 | hsa-miR-107_st2 | 11.55 | 11.28 | 11.41 | 0.19 | 100 | 12.5 | 12.6 | 12.9 | 12.5 | 12.7 | 12.9 | 13.1 |
| hsa-miR-27b | hsa-miR-27b_st1 | 10.40 | 11.22 | 10.81 | 0.58 | 100 | 12.0 | 12.1 | 12.1 | 12.2 | 12.3 | 12.2 | 12.3 |
| hsa-miR-376a | hsa-miR-376a_st2 | 2.38 | 4.13 | 3.26 | 1.24 | 0 | 4.0 | 4.7 | 4.6 | 4.4 | 4.9 | 5.0 | 5.1 |
| hsa-miR-142-5p | hsa-miR-142-5p_st2 | 4.58 | 5.35 | 4.96 | 0.54 | 0 | 5.7 | 6.3 | 6.6 | 5.9 | 7.2 | 6.0 | 6.8 |
| hsa-miR-140 | hsa-miR-140_st2 | 5.42 | 6.50 | 5.96 | 0.77 | 50 | 8.1 | 7.1 | 6.5 | 7.5 | 7.1 | 7.4 | 8.2 |
| hsa-miR-205 | hsa-miR-205_st1 | 2.12 | 3.51 | 2.81 | 0.98 | 0 | 5.0 | 3.7 | 4.7 | 4.2 | 3.3 | 5.1 | 4.2 |
| hsa-miR-100 | hsa-miR-100_st2 | 10.15 | 11.14 | 10.64 | 0.70 | 100 | 11.5 | 12.2 | 12.1 | 12.4 | 12.8 | 11.8 | 12.2 |
| hsa-miR-489 | hsa-miR-489_st2 | 3.68 | 4.02 | 3.85 | 0.24 | 0 | 4.7 | 5.0 | 5.0 | 5.8 | 5.3 | 5.2 | 6.4 |
| hsa-miR-10b | hsa-miR-10b_st2 | 10.25 | 11.29 | 10.77 | 0.74 | 100 | 12.2 | 12.3 | 12.4 | 12.4 | 12.5 | 12.0 | 12.4 |
| hsa-miR-106b | hsa-miR-106b_st2 | 8.78 | 8.72 | 8.75 | 0.05 | 100 | 10.8 | 10.0 | 9.9 | 9.8 | 9.4 | 10.7 | 11.3 |
| hsa-miR-320 | hsa-miR-320_st1 | 9.33 | 8.80 | 9.07 | 0.37 | 100 | 10.2 | 10.6 | 10.8 | 10.0 | 11.2 | 10.9 | 10.9 |
| hsa-miR-200b | hsa-miR-200b_st1 | 5.24 | 5.45 | 5.34 | 0.15 | 50 | 6.3 | 6.1 | 6.9 | 7.1 | 6.8 | 7.4 | 8.1 |
| hsa-miR-19b | hsa-miR-19b_st2 | 6.36 | 7.34 | 6.85 | 0.69 | 100 | 8.6 | 8.4 | 8.5 | 7.6 | 8.2 | 8.9 | 9.3 |
| hsa-miR-199b | hsa-miR-199b_st2 | 6.23 | 7.84 | 7.03 | 1.13 | 100 | 8.1 | 8.8 | 8.1 | 8.4 | 9.2 | 8.9 | 9.3 |
| hsa-miR-148a | hsa-miR-148a_st1 | 9.15 | 10.89 | 10.02 | 1.23 | 100 | 11.9 | 11.8 | 11.4 | 12.2 | 11.4 | 11.9 | 11.8 |
| hsa-miR-189 | hsa-miR-189_st1 | 2.51 | 4.57 | 3.54 | 1.45 | 0 | 5.2 | 5.4 | 5.0 | 5.2 | 5.6 | 4.7 | 6.0 |
| hsa-miR-155 | hsa-miR-155_st1 | 13.60 | 10.33 | 11.96 | 2.32 | 100 | 13.9 | 13.8 | 13.9 | 13.6 | 13.6 | 13.6 | 13.6 |
| hsa-miR-200c | hsa-miR-200c_st1 | 6.68 | 5.41 | 6.05 | 0.90 | 50 | 8.9 | 7.3 | 7.0 | 8.7 | 6.9 | 7.9 | 8.0 |
| hsa-miR-203 | hsa-miR-203_st2 | 4.58 | 3.58 | 4.08 | 0.71 | 0 | 4.4 | 5.9 | 5.8 | 5.9 | 5.9 | 6.6 | 6.4 |
| hsa-miR-425-5p | hsa-asg-14166_st2 | 8.77 | 8.96 | 8.86 | 0.13 | 100 | 10.1 | 10.5 | 10.4 | 10.3 | 10.4 | 11.1 | 11.5 |
| hsa-miR-197 | hsa-miR-197_st1 | 8.80 | 7.08 | 7.94 | 1.21 | 100 | 9.5 | 9.3 | 9.7 | 9.3 | 9.7 | 10.2 | 10.2 |
| hsa-miR-505 | hsa-miR-505_st1 | 7.32 | 6.79 | 7.05 | 0.38 | 100 | 8.8 | 8.3 | 8.8 | 9.1 | 8.8 | 8.8 | 9.5 |
| hsa-miR-101 | hsa-miR-101_st1 | 5.16 | 5.95 | 5.55 | 0.55 | 50 | 8.4 | 6.9 | 6.7 | 6.9 | 6.5 | 7.6 | 8.5 |
| hsa-miR-126 | hsa-miR-126_st2 | 10.47 | 11.17 | 10.82 | 0.49 | 100 | 12.1 | 12.9 | 12.9 | 12.7 | 12.9 | 12.4 | 12.7 |
| hsa-miR-186 | hsa-miR-186_st1 | 5.16 | 6.69 | 5.93 | 1.08 | 50 | 7.4 | 8.0 | 7.3 | 7.8 | 8.0 | 7.4 | 8.7 |
| hsa-miR-145 | hsa-miR-145_st1 | 10.87 | 11.78 | 11.33 | 0.64 | 100 | 13.0 | 13.4 | 13.1 | 13.4 | 13.4 | 13.0 | 13.0 |
| hsa-miR-30e-3p | hsa-miR-30e-3p_st1 | 6.94 | 6.60 | 6.77 | 0.24 | 100 | 8.2 | 9.0 | 8.9 | 8.9 | 8.9 | 8.1 | 8.9 |
| hsa-miR-497 | hsa-miR43_st1 | 5.35 | 5.80 | 5.57 | 0.31 | 0 | 7.2 | 7.7 | 7.7 | 7.3 | 7.9 | 7.7 | 7.9 |
| hsa-miR-15a | hsa-miR-15a_st1 | 9.11 | 10.19 | 9.65 | 0.76 | 100 | 12.1 | 11.8 | 11.4 | 11.7 | 11.3 | 11.5 | 12.2 |
| hsa-miR-342 | hsa-miR-342_st1 | 12.16 | 10.81 | 11.48 | 0.96 | 100 | 13.4 | 13.7 | 13.8 | 13.3 | 13.6 | 13.5 | 13.5 |
| hsa-miR-142-3p | hsa-miR-142-3p_st2 | 2.77 | 3.48 | 3.13 | 0.50 | 0 | 5.2 | 5.1 | 5.1 | 5.0 | 4.8 | 5.1 | 6.2 |
| hsa-miR-486 | hsa-miR-486_st2 | 6.17 | 5.63 | 5.90 | 0.38 | 0 | 8.2 | 7.4 | 8.2 | 8.1 | 7.2 | 8.5 | 8.3 |
| hsa-miR-22 | hsa-miR-22_st1 | 9.66 | 9.24 | 9.45 | 0.30 | 100 | 10.6 | 11.6 | 11.8 | 11.3 | 11.8 | 11.9 | 12.0 |
| hsa-miR-199a* | hsa-miR-199a-_st1 | 10.51 | 10.89 | 10.70 | 0.27 | 100 | 12.6 | 13.0 | 13.1 | 12.7 | 13.1 | 12.7 | 12.8 |
| hsa-miR-484 | hsa-miR-484_st2 | 6.47 | 6.02 | 6.24 | 0.32 | 0 | 8.4 | 8.2 | 8.2 | 8.2 | 8.2 | 8.7 | 9.0 |
| hsa-miR-194 | hsa-miR-194_st2 | 7.23 | 7.54 | 7.39 | 0.21 | 100 | 8.7 | 9.4 | 9.4 | 9.4 | 9.3 | 10.4 | 10.6 |
| hsa-miR-331 | hsa-miR-331_st2 | 6.13 | 6.73 | 6.43 | 0.42 | 50 | 9.4 | 8.4 | 7.9 | 8.4 | 8.3 | 8.6 | 9.5 |
| hsa-miR-223 | hsa-miR-223_st1 | 9.03 | 9.24 | 9.14 | 0.15 | 100 | 10.1 | 11.9 | 11.5 | 11.6 | 11.7 | 11.2 | 11.7 |
| hsa-miR-150 | hsa-miR-150_st1 | 12.40 | 9.22 | 10.81 | 2.25 | 100 | 13.4 | 13.4 | 13.0 | 13.3 | 13.2 | 12.6 | 13.0 |
| hsa-miR-224 | hsa-miR-224_st2 | 6.09 | 6.48 | 6.28 | 0.28 | 100 | 7.1 | 8.3 | 8.3 | 8.8 | 9.6 | 9.2 | 9.1 |
| hsa-miR-625 | hsa-miR-625_st1 | 7.43 | 6.22 | 6.82 | 0.86 | 100 | 10.4 | 8.5 | 8.9 | 9.0 | 8.4 | 9.5 | 9.6 |
| hsa-miR-598 | hsa-miR-598_st2 | 5.45 | 3.81 | 4.63 | 1.16 | 0 | 8.0 | 7.0 | 6.7 | 6.7 | 6.1 | 7.2 | 8.0 |
| hsa-miR-139 | hsa-miR-139_st2 | 7.15 | 6.63 | 6.89 | 0.37 | 100 | 8.9 | 9.2 | 9.2 | 9.7 | 10.3 | 9.3 | 9.4 |
| hsa-miR-133a | hsa-miR-133a_st1 | 3.87 | 3.27 | 3.57 | 0.42 | 0 | 5.1 | 6.0 | 6.2 | 6.6 | 7.2 | 5.9 | 6.3 |
| hsa-miR-133b | hsa-miR-133b_st2 | 1.76 | 3.51 | 2.63 | 1.24 | 0 | 3.7 | 5.4 | 4.8 | 6.0 | 6.1 | 5.7 | 5.2 |
| hsa-miR-629 | hsa-miR-629_st1 | 4.99 | 2.83 | 3.91 | 1.53 | 0 | 8.2 | 5.7 | 5.8 | 6.9 | 5.8 | 6.7 | 6.9 |
| hsa-miR-99a | hsa-miR-99a_st2 | 7.73 | 9.49 | 8.61 | 1.25 | 100 | 10.5 | 11.3 | 11.3 | 11.5 | 11.9 | 11.3 | 11.8 |
| hsa-miR-29b | hsa-miR-29b_st1 | 8.45 | 7.72 | 8.09 | 0.52 | 100 | 11.3 | 11.0 | 10.8 | 11.0 | 10.5 | 10.3 | 11.1 |
| hsa-miR-195 | hsa-miR-195_st2 | 9.62 | 10.58 | 10.10 | 0.68 | 100 | 12.7 | 13.0 | 12.8 | 12.9 | 13.0 | 12.7 | 12.8 |
| hsa-miR-452 | hsa-miR-452_st1 | 3.15 | 3.48 | 3.31 | 0.24 | 0 | 4.0 | 5.7 | 6.4 | 5.4 | 7.1 | 7.2 | 7.1 |
| hsa-miR-215 | hsa-miR-215_st1 | 3.48 | 4.72 | 4.10 | 0.87 | 0 | 6.3 | 6.9 | 6.9 | 6.9 | 6.4 | 7.3 | 8.0 |
| hsa-miR-29c | hsa-miR-29c_st2 | 8.12 | 6.96 | 7.54 | 0.82 | 100 | 11.2 | 10.4 | 10.5 | 9.8 | 9.8 | 10.3 | 10.9 |
| hsa-miR-17-3p | hsa-miR-17-3p_st1 | 3.68 | 4.13 | 3.91 | 0.32 | 0 | 6.9 | 7.0 | 6.5 | 6.1 | 6.1 | 7.2 | 7.8 |
| hsa-miR-199a | hsa-miR-199a_st2 | 6.71 | 7.81 | 7.26 | 0.78 | 100 | 9.5 | 10.1 | 10.2 | 10.1 | 10.5 | 10.3 | 10.5 |
| hsa-miR-7 | hsa-miR-7_st1 | 6.70 | 6.94 | 6.82 | 0.17 | 100 | 10.3 | 9.7 | 9.1 | 9.6 | 9.2 | 10.5 | 10.7 |
| hsa-miR-218 | hsa-miR-218_st2 | 5.83 | 5.93 | 5.88 | 0.07 | 50 | 8.1 | 8.6 | 8.5 | 9.4 | 9.2 | 9.0 | 9.9 |
| hsa-miR-425-3p | hsa-miR-425_st2 | 3.02 | 3.70 | 3.36 | 0.48 | 0 | 5.8 | 6.6 | 6.2 | 5.9 | 6.4 | 7.2 | 7.3 |
| hsa-miR-143 | hsa-miR-143_st2 | 9.02 | 10.00 | 9.51 | 0.69 | 100 | 12.0 | 12.8 | 12.7 | 12.7 | 13.1 | 12.7 | 12.8 |
| hsa-miR-192 | hsa-miR-192_st2 | 6.99 | 6.17 | 6.58 | 0.58 | 100 | 10.2 | 10.2 | 10.6 | 10.2 | 10.0 | 11.3 | 11.6 |
| hsa-miR-95 | hsa-miR-95_st1 | 5.49 | 4.24 | 4.86 | 0.88 | 0 | 8.7 | 8.5 | 8.6 | 9.7 | 8.4 | 9.1 | 10.1 |
| hsa-miR-335 | hsa-miR-335_st1 | 5.08 | 5.18 | 5.13 | 0.07 | 0 | 8.3 | 9.4 | 9.0 | 9.2 | 9.7 | 9.6 | 10.2 |
| hsa-miR-1 | hsa-miR-1_st1 | 5.12 | 5.40 | 5.26 | 0.20 | 50 | 8.3 | 9.6 | 8.7 | 10.7 | 10.2 | 9.6 | 10.0 |
| hsa-miR-31 | hsa-miR-31_st2 | 5.83 | 5.88 | 5.86 | 0.04 | 50 | 7.2 | 10.8 | 10.5 | 10.3 | 10.5 | 12.2 | 12.0 |
| hsa-asg-5638 | hsa-asg-5638_st2 | 8.00 | 7.67 | 7.84 | 0.24 | 100 | 3.2 | 5.2 | 3.0 | 3.0 | 3.5 | 3.6 | 3.5 |
| hsa-asg-5630 | hsa-asg-5630_st2 | 7.87 | 6.45 | 7.16 | 1.00 | 100 | 6.5 | 4.2 | 3.0 | 3.7 | 2.9 | 4.5 | 3.5 |
| hsa-asg-11338 | hsa-asg-11338_st2 | 6.88 | 6.40 | 6.64 | 0.34 | 100 | 4.3 | 3.9 | 3.5 | 3.7 | 4.5 | 3.7 | 4.2 |
| hsa-asg-9186 | hsa-asg-9186_st1 | 5.83 | 9.76 | 7.79 | 2.78 | 50 | 4.3 | 6.1 | 5.3 | 5.2 | 5.1 | 5.1 | 5.2 |
| hsa-asg-1946 | hsa-asg-1946_st1 | 7.26 | 3.04 | 5.15 | 2.99 | 50 | 1.9 | 2.9 | 2.5 | 2.6 | 3.0 | 3.1 | 3.0 |
| hsa-asg-14190 | hsa-asg-14190_st2 | 6.38 | 3.21 | 4.80 | 2.24 | 50 | 2.1 | 2.9 | 3.0 | 3.4 | 2.0 | 3.0 | 3.2 |
| hsa-asg-11966 | hsa-asg-11966_st1 | 5.61 | 5.25 | 5.43 | 0.25 | 0 | 3.3 | 3.4 | 3.3 | 5.2 | 4.1 | 2.2 | 2.8 |
| hsa-asg-12271 | hsa-asg-12271_st1 | 5.58 | 7.43 | 6.51 | 1.31 | 50 | 4.5 | 4.5 | 4.5 | 4.3 | 4.2 | 4.9 | 5.0 |
| hsa-asg-381 | hsa-asg-381_st1 | 6.34 | 3.40 | 4.87 | 2.08 | 50 | 2.3 | 4.0 | 2.8 | 3.0 | 2.9 | 2.0 | 3.6 |
| hsa-asg-4051 | hsa-asg-4051_st1 | 6.29 | 3.10 | 4.69 | 2.26 | 50 | 2.6 | 2.8 | 2.6 | 2.3 | 2.9 | 3.0 | 3.4 |
| hsa-asg-8322 | hsa-asg-8322_st2 | 6.38 | 2.86 | 4.62 | 2.49 | 50 | 2.9 | 2.7 | 2.8 | 2.9 | 2.7 | 2.9 | 2.6 |
| hsa-asg-12810 | hsa-asg-12810_st1 | 6.19 | 3.04 | 4.62 | 2.23 | 50 | 3.4 | 2.4 | 2.2 | 2.9 | 2.8 | 2.6 | 3.4 |
| hsa-asg-11238 | hsa-asg-11238_st2 | 4.46 | 6.07 | 5.26 | 1.14 | 50 | 2.3 | 4.0 | 3.4 | 4.4 | 4.1 | 3.6 | 3.6 |
| hsa-asg-10031 | hsa-asg-10031_st1 | 4.46 | 6.44 | 5.45 | 1.40 | 50 | 4.6 | 3.3 | 3.9 | 3.5 | 4.1 | 3.5 | 4.9 |
| hsa-asg-9858 | hsa-asg-9858_st2 | 8.37 | 7.09 | 7.73 | 0.90 | 100 | 5.7 | 6.4 | 6.3 | 6.7 | 6.3 | 6.5 | 6.6 |
| hsa-asg-12381 | hsa-asg-12381_st1 | 6.45 | 8.25 | 7.35 | 1.28 | 50 | 5.7 | 5.9 | 6.1 | 6.5 | 6.1 | 5.8 | 6.4 |
| hsa-asg-2261 | hsa-asg-2261_st1 | 4.95 | 4.06 | 4.50 | 0.63 | 0 | 3.1 | 3.4 | 3.1 | 3.1 | 3.1 | 3.2 | 4.0 |
| hsa-asg-8633 | hsa-asg-8633_st1 | 6.89 | 8.27 | 7.58 | 0.97 | 100 | 6.5 | 6.3 | 6.5 | 6.6 | 6.1 | 6.0 | 6.7 |
| hsa-asg-9903 | hsa-asg-9903_st2 | 5.61 | 5.57 | 5.59 | 0.03 | 50 | 4.4 | 4.1 | 4.5 | 5.2 | 4.3 | 3.3 | 4.9 |
| hsa-asg-13893 | hsa-asg-13893_st2 | 5.88 | 7.69 | 6.79 | 1.28 | 50 | 5.3 | 5.9 | 5.7 | 5.8 | 5.4 | 5.6 | 5.6 |
| hsa-asg-4780 | hsa-asg-4780_st1 | 7.44 | 6.26 | 6.85 | 0.83 | 100 | 5.2 | 6.2 | 5.9 | 5.1 | 6.2 | 5.6 | 5.7 |
| hsa-asg-11850 | hsa-asg-11850_st1 | 10.27 | 12.03 | 11.15 | 1.25 | 100 | 9.7 | 10.0 | 10.0 | 10.3 | 10.4 | 9.5 | 10.4 |
| hsa-asg-8882 | hsa-asg-8882_st1 | 6.92 | 8.89 | 7.91 | 1.40 | 100 | 6.7 | 7.0 | 7.0 | 6.8 | 6.8 | 6.8 | 6.8 |
| hsa-asg-4088 | hsa-asg-4088_st2 | 5.45 | 5.49 | 5.47 | 0.03 | 50 | 4.5 | 4.0 | 4.4 | 4.9 | 5.1 | 3.7 | 4.7 |
| hsa-asg-12086 | hsa-asg-12086_st2 | 6.84 | 5.28 | 6.06 | 1.11 | 50 | 4.8 | 5.4 | 5.1 | 5.3 | 5.4 | 5.0 | 4.8 |
| hsa-asg-8600 | hsa-asg-8600_st2 | 6.15 | 6.10 | 6.13 | 0.04 | 100 | 5.4 | 5.5 | 5.2 | 4.5 | 5.5 | 4.9 | 5.1 |
| hsa-asg-8700 | hsa-asg-8700_st1 | 5.78 | 6.43 | 6.11 | 0.46 | 50 | 4.8 | 5.9 | 5.0 | 5.0 | 5.1 | 5.2 | 5.1 |
| hsa-asg-8693 | hsa-asg-8693_st1 | 5.81 | 6.88 | 6.34 | 0.76 | 50 | 5.3 | 5.7 | 5.5 | 5.8 | 4.8 | 5.2 | 5.5 |
| hsa-asg-9130 | hsa-asg-9130_st2 | 7.33 | 8.86 | 8.09 | 1.08 | 100 | 7.0 | 7.3 | 7.1 | 7.5 | 7.1 | 7.3 | 7.2 |
| hsa-asg-12880 | hsa-asg-12880_st1 | 8.02 | 9.28 | 8.65 | 0.90 | 100 | 7.9 | 7.8 | 7.7 | 8.1 | 8.0 | 7.7 | 7.8 |
| hsa-cand660 | hsa-cand660_st1 | 3.37 | 3.85 | 3.61 | 0.34 | 0 | 2.9 | 2.3 | 3.4 | 3.1 | 2.8 | 2.5 | 2.8 |
| hsa-asg-7252 | hsa-asg-7252_st1 | 6.97 | 6.14 | 6.55 | 0.59 | 100 | 5.7 | 5.6 | 6.2 | 5.6 | 6.0 | 5.9 | 5.5 |
| hsa-asg-10881 | hsa-asg-10881_st1 | 6.52 | 6.36 | 6.44 | 0.11 | 100 | 5.0 | 5.9 | 5.7 | 5.8 | 6.1 | 6.0 | 5.8 |
| hsa-asg-3266 | hsa-asg-3266_st2 | 7.45 | 7.26 | 7.35 | 0.14 | 100 | 6.8 | 6.5 | 6.2 | 7.0 | 7.1 | 6.3 | 6.9 |
| hsa-asg-11906 | hsa-asg-11906_st1 | 5.55 | 5.94 | 5.74 | 0.28 | 50 | 5.2 | 5.4 | 5.2 | 5.4 | 5.1 | 4.7 | 4.9 |
| hsa-asg-10815 | hsa-asg-10815_st1 | 6.29 | 6.72 | 6.51 | 0.31 | 50 | 5.4 | 6.0 | 6.3 | 6.1 | 6.0 | 5.6 | 6.0 |
| hsa-asg-2388 | hsa-asg-2388_st2 | 5.08 | 5.52 | 5.30 | 0.32 | 50 | 4.7 | 4.9 | 4.9 | 4.9 | 4.8 | 4.1 | 4.6 |
| hsa-cand913 | hsa-cand913_st1 | 12.99 | 13.29 | 13.14 | 0.21 | 100 | 12.8 | 12.7 | 12.6 | 12.7 | 12.5 | 12.4 | 12.6 |
| hsa-cand526 | hsa-cand526_st1 | 5.45 | 4.89 | 5.17 | 0.40 | 50 | 4.7 | 4.6 | 4.4 | 4.8 | 4.9 | 4.6 | 4.7 |
| hsa-asg-4217 | hsa-asg-4217_st2 | 6.75 | 7.13 | 6.94 | 0.27 | 100 | 6.1 | 6.6 | 6.7 | 6.2 | 6.4 | 6.4 | 6.7 |
| hsa-asg-12775 | hsa-asg-12775_st1 | 8.08 | 7.77 | 7.93 | 0.22 | 100 | 7.4 | 8.0 | 7.3 | 7.5 | 7.3 | 7.2 | 7.3 |
| hsa-asg-13294 | hsa-asg-13294_st2 | 6.53 | 6.82 | 6.68 | 0.21 | 100 | 6.4 | 6.3 | 6.3 | 6.5 | 6.1 | 6.1 | 6.2 |
| hsa-asg-1913 | hsa-asg-1913_st1 | 5.91 | 5.81 | 5.86 | 0.06 | 0 | 5.7 | 5.6 | 5.7 | 5.8 | 5.4 | 5.6 | 5.5 |
| hsa-asg-2826 | hsa-asg-2826_st1 | 6.33 | 6.52 | 6.42 | 0.14 | 50 | 6.7 | 6.7 | 6.7 | 6.6 | 6.6 | 6.5 | 6.7 |
| hsa-asg-14025 | hsa-asg-14025_st1 | 6.34 | 6.30 | 6.32 | 0.03 | 0 | 6.4 | 6.6 | 6.6 | 6.9 | 6.7 | 6.7 | 6.6 |
| hsa-asg-6951 | hsa-asg-6951_st2 | 6.79 | 7.11 | 6.95 | 0.22 | 50 | 7.3 | 7.4 | 7.3 | 7.3 | 7.6 | 7.4 | 7.4 |
| hsa-cand950 | hsa-cand950_st2 | 5.83 | 6.50 | 6.16 | 0.47 | 50 | 6.6 | 6.5 | 6.7 | 6.7 | 6.5 | 6.7 | 6.4 |
| hsa-asg-5032 | hsa-asg-5032_st2 | 8.67 | 9.15 | 8.91 | 0.34 | 100 | 9.1 | 9.2 | 9.4 | 9.5 | 9.3 | 9.7 | 9.5 |
| hsa-asg-8672 | hsa-asg-8672_st1 | 3.87 | 3.21 | 3.54 | 0.46 | 0 | 4.1 | 3.9 | 4.1 | 4.0 | 4.1 | 4.2 | 3.7 |
| hsa-asg-7565 | hsa-asg-7565_st2 | 5.31 | 4.55 | 4.93 | 0.54 | 0 | 5.6 | 5.6 | 5.6 | 5.3 | 5.5 | 5.2 | 5.3 |
| hsa-asg-1153 | hsa-asg-1153_st1 | 6.72 | 6.64 | 6.68 | 0.06 | 50 | 7.3 | 7.2 | 7.2 | 7.2 | 7.0 | 7.5 | 7.1 |
| hsa-asg-7569 | hsa-asg-7569_st1 | 4.90 | 4.61 | 4.75 | 0.20 | 0 | 5.1 | 5.5 | 5.3 | 5.1 | 5.5 | 4.9 | 5.6 |
| hsa-asg-6638 | hsa-asg-6638_st2 | 5.16 | 4.93 | 5.05 | 0.16 | 0 | 5.8 | 5.8 | 5.8 | 5.4 | 5.8 | 5.5 | 5.2 |
| hsa-cand109 | hsa-cand109_st1 | 6.23 | 7.01 | 6.62 | 0.55 | 50 | 7.0 | 7.2 | 7.2 | 7.3 | 7.1 | 7.4 | 7.1 |
| hsa-asg-1631 | hsa-asg-1631_st1 | 4.70 | 4.87 | 4.78 | 0.12 | 0 | 5.2 | 4.9 | 5.5 | 5.5 | 5.3 | 5.4 | 5.8 |
| hsa-asg-13143 | hsa-asg-13143_st2 | 12.67 | 12.51 | 12.59 | 0.12 | 100 | 12.9 | 13.4 | 13.7 | 12.8 | 13.2 | 13.0 | 13.2 |
| hsa-asg-4114 | hsa-asg-4114_st2 | 4.85 | 4.79 | 4.82 | 0.04 | 0 | 5.2 | 5.9 | 5.4 | 5.1 | 5.2 | 5.6 | 5.5 |
| hsa-cand407 | hsa-cand407_st1 | 5.12 | 4.44 | 4.78 | 0.48 | 0 | 5.4 | 5.2 | 5.3 | 5.7 | 5.5 | 5.1 | 5.2 |
| hsa-asg-7869 | hsa-asg-7869_st1 | 5.86 | 5.33 | 5.59 | 0.37 | 50 | 6.3 | 5.8 | 5.9 | 6.2 | 6.6 | 6.3 | 6.1 |
| hsa-asg-795 | hsa-asg-795_st2 | 4.80 | 5.54 | 5.17 | 0.52 | 50 | 5.8 | 6.2 | 5.9 | 5.5 | 5.8 | 5.6 | 5.5 |
| hsa-asg-826 | hsa-asg-826_st1 | 7.40 | 8.16 | 7.78 | 0.54 | 100 | 8.0 | 8.3 | 8.6 | 8.6 | 8.5 | 8.3 | 8.5 |
| hsa-asg-948 | hsa-asg-948_st1 | 5.45 | 5.08 | 5.27 | 0.26 | 0 | 6.0 | 5.6 | 5.9 | 5.9 | 6.4 | 5.6 | 5.8 |
| hsa-asg-1236 | hsa-asg-1236_st1 | 5.04 | 5.76 | 5.40 | 0.51 | 0 | 6.0 | 6.1 | 6.0 | 5.8 | 6.2 | 5.9 | 6.2 |
| hsa-cand458 | hsa-cand458_st2 | 4.75 | 5.33 | 5.04 | 0.41 | 0 | 5.6 | 6.0 | 5.8 | 5.4 | 6.0 | 5.6 | 5.3 |
| hsa-asg-10619 | hsa-asg-10619_st1 | 5.55 | 5.04 | 5.30 | 0.36 | 0 | 6.3 | 6.2 | 6.0 | 6.0 | 5.4 | 5.8 | 5.9 |
| hsa-cand583 | hsa-cand583_st1 | 4.95 | 5.63 | 5.29 | 0.49 | 0 | 6.2 | 5.9 | 5.6 | 6.2 | 6.1 | 5.9 | 5.7 |
| hsa-asg-58 | hsa-asg-58_st1 | 4.40 | 4.24 | 4.32 | 0.11 | 0 | 5.2 | 5.2 | 4.8 | 4.7 | 4.7 | 5.0 | 5.3 |
| hsa-asg-9815 | hsa-asg-9815_st2 | 5.67 | 5.85 | 5.76 | 0.13 | 0 | 6.1 | 6.3 | 6.7 | 6.2 | 6.4 | 6.6 | 6.6 |
| hsa-asg-2615 | hsa-asg-2615_st2 | 8.31 | 8.90 | 8.61 | 0.42 | 100 | 9.0 | 9.4 | 9.2 | 9.6 | 9.1 | 9.1 | 9.7 |
| hsa-asg-1391 | hsa-asg-1391_st1 | 5.98 | 6.95 | 6.46 | 0.69 | 50 | 7.1 | 7.0 | 7.3 | 7.4 | 6.8 | 6.8 | 7.6 |
| hsa-asg-4433 | hsa-asg-4433_st1 | 4.46 | 4.44 | 4.45 | 0.02 | 0 | 5.2 | 5.5 | 5.3 | 4.9 | 5.0 | 5.4 | 4.8 |
| hsa-asg-1545 | hsa-asg-1545_st1 | 4.90 | 5.33 | 5.11 | 0.30 | 0 | 5.9 | 6.0 | 5.9 | 5.5 | 6.1 | 5.7 | 5.7 |
| hsa-asg-10575 | hsa-asg-10575_st1 | 6.33 | 7.45 | 6.89 | 0.80 | 100 | 7.6 | 7.6 | 7.8 | 7.8 | 7.3 | 7.4 | 7.8 |
| hsa-asg-2134 | hsa-asg-2134_st2 | 3.68 | 4.44 | 4.06 | 0.53 | 0 | 4.4 | 5.1 | 4.8 | 5.1 | 4.8 | 4.5 | 4.7 |
| hsa-asg-1599 | hsa-asg-1599_st1 | 4.19 | 4.61 | 4.40 | 0.30 | 0 | 5.0 | 4.9 | 5.4 | 5.5 | 4.9 | 4.9 | 5.3 |
| hsa-asg-555 | hsa-asg-555_st1 | 6.15 | 6.82 | 6.49 | 0.47 | 50 | 6.6 | 7.2 | 7.1 | 7.3 | 7.2 | 7.5 | 7.6 |
| hsa-asg-1941 | hsa-asg-1941_st2 | 4.58 | 3.53 | 4.06 | 0.74 | 0 | 4.6 | 5.3 | 4.8 | 4.8 | 4.8 | 4.6 | 4.7 |
| hsa-asg-2843 | hsa-asg-2843_st1 | 4.19 | 4.67 | 4.43 | 0.34 | 0 | 5.2 | 5.3 | 4.8 | 5.2 | 5.3 | 5.5 | 5.0 |
| hsa-asg-11867 | hsa-asg-11867_st1 | 4.19 | 4.40 | 4.30 | 0.15 | 0 | 5.5 | 4.7 | 5.1 | 4.9 | 5.1 | 5.1 | 4.9 |
| hsa-asg-9739 | hsa-asg-9739_st1 | 4.64 | 4.84 | 4.74 | 0.14 | 50 | 5.1 | 5.2 | 5.8 | 5.4 | 5.6 | 5.3 | 5.9 |
| hsa-asg-11329 | hsa-asg-11329_st1 | 5.04 | 3.94 | 4.49 | 0.78 | 0 | 5.4 | 5.5 | 5.0 | 5.4 | 5.4 | 4.9 | 5.0 |
| hsa-asg-4196 | hsa-asg-4196_st2 | 5.28 | 5.70 | 5.49 | 0.30 | 0 | 6.1 | 6.6 | 6.2 | 6.0 | 6.5 | 6.2 | 6.2 |
| hsa-asg-9597 | hsa-asg-9597_st2 | 4.33 | 4.20 | 4.27 | 0.09 | 0 | 5.7 | 5.0 | 5.1 | 4.8 | 5.6 | 4.6 | 4.7 |
| hsa-asg-2041 | hsa-asg-2041_st1 | 4.75 | 4.73 | 4.74 | 0.01 | 0 | 5.3 | 5.1 | 5.7 | 5.7 | 5.3 | 5.7 | 6.0 |
| hsa-asg-10914 | hsa-asg-10914_st1 | 3.68 | 4.31 | 4.00 | 0.44 | 0 | 4.6 | 4.8 | 4.5 | 4.7 | 4.9 | 5.2 | 4.9 |
| hsa-asg-8598 | hsa-asg-8598_st2 | 4.99 | 5.35 | 5.17 | 0.25 | 0 | 5.9 | 6.1 | 6.4 | 5.4 | 6.1 | 6.0 | 6.0 |
| hsa-asg-4587 | hsa-asg-4587_st1 | 4.80 | 4.74 | 4.77 | 0.04 | 0 | 5.9 | 5.6 | 5.5 | 5.5 | 5.6 | 5.6 | 5.3 |
| hsa-asg-7643 | hsa-asg-7643_st2 | 7.43 | 6.99 | 7.21 | 0.31 | 0 | 7.8 | 7.9 | 7.9 | 7.4 | 8.0 | 8.5 | 8.7 |
| hsa-asg-2693 | hsa-asg-2693_st1 | 5.67 | 5.31 | 5.49 | 0.25 | 0 | 6.1 | 6.4 | 6.6 | 5.8 | 6.6 | 6.7 | 6.0 |
| hsa-asg-6651 | hsa-asg-6651_st2 | 5.49 | 5.22 | 5.35 | 0.19 | 0 | 6.5 | 5.9 | 6.6 | 6.0 | 6.1 | 6.1 | 6.1 |
| hsa-asg-8675 | hsa-asg-8675_st1 | 5.52 | 6.28 | 5.90 | 0.54 | 0 | 6.5 | 6.1 | 6.8 | 7.1 | 6.8 | 6.7 | 7.0 |
| hsa-asg-5576 | hsa-asg-5576_st1 | 5.20 | 5.19 | 5.20 | 0.01 | 0 | 5.4 | 6.4 | 6.5 | 5.5 | 6.0 | 6.5 | 6.3 |
| hsa-asg-8477 | hsa-asg-8477_st1 | 6.36 | 7.20 | 6.78 | 0.60 | 100 | 8.0 | 7.9 | 7.6 | 7.8 | 7.2 | 7.3 | 7.8 |
| hsa-asg-6838 | hsa-asg-6838_st1 | 5.12 | 5.37 | 5.25 | 0.18 | 0 | 6.0 | 6.3 | 6.3 | 6.0 | 6.1 | 6.0 | 6.3 |
| hsa-asg-2989 | hsa-asg-2989_st1 | 4.11 | 3.98 | 4.05 | 0.10 | 0 | 4.3 | 4.8 | 5.2 | 5.5 | 4.9 | 4.7 | 5.2 |
| hsa-asg-10796 | hsa-asg-10796_st1 | 5.52 | 4.70 | 5.11 | 0.57 | 0 | 6.1 | 6.2 | 6.2 | 5.8 | 6.1 | 5.8 | 5.8 |
| hsa-asg-6005 | hsa-asg-6005_st1 | 5.64 | 6.78 | 6.21 | 0.80 | 50 | 6.8 | 6.9 | 7.5 | 6.7 | 7.5 | 7.0 | 7.3 |
| hsa-asg-9562 | hsa-asg-9562_st2 | 4.40 | 4.67 | 4.53 | 0.19 | 0 | 5.6 | 5.9 | 5.2 | 5.5 | 6.1 | 4.8 | 5.0 |
| hsa-asg-12049 | hsa-asg-12049_st2 | 5.91 | 6.91 | 6.41 | 0.71 | 50 | 7.3 | 7.3 | 7.7 | 7.3 | 6.8 | 7.2 | 7.6 |
| hsa-asg-1362 | hsa-asg-1362_st2 | 3.87 | 3.53 | 3.70 | 0.24 | 0 | 4.8 | 4.0 | 4.2 | 4.6 | 5.4 | 4.7 | 4.4 |
| hsa-asg-9004 | hsa-asg-9004_st1 | 6.84 | 7.44 | 7.14 | 0.42 | 100 | 8.0 | 7.8 | 7.8 | 8.4 | 8.0 | 8.5 | 7.9 |
| hsa-asg-593 | hsa-asg-593_st2 | 3.68 | 3.58 | 3.63 | 0.07 | 0 | 4.9 | 4.6 | 4.0 | 4.4 | 4.6 | 4.7 | 4.6 |
| hsa-asg-11181 | hsa-asg-11181_st1 | 4.58 | 5.49 | 5.03 | 0.64 | 0 | 6.0 | 5.8 | 5.1 | 6.1 | 6.3 | 5.9 | 6.5 |
| hsa-asg-6634 | hsa-asg-6634_st2 | 3.37 | 4.31 | 3.84 | 0.66 | 0 | 4.8 | 5.1 | 5.2 | 4.7 | 4.9 | 3.8 | 4.9 |
| hsa-asg-3340 | hsa-asg-3340_st2 | 4.64 | 5.73 | 5.19 | 0.77 | 0 | 5.6 | 6.2 | 6.6 | 6.3 | 5.8 | 5.8 | 6.6 |
| hsa-asg-10506 | hsa-asg-10506_st2 | 4.64 | 5.65 | 5.14 | 0.71 | 0 | 6.2 | 5.8 | 6.1 | 6.0 | 6.0 | 6.2 | 6.3 |
| hsa-asg-11380 | hsa-asg-11380_st2 | 1.43 | 2.86 | 2.15 | 1.01 | 0 | 2.8 | 2.7 | 3.6 | 3.1 | 3.4 | 3.3 | 2.8 |
| hsa-cand902 | hsa-cand902_st1 | 4.52 | 5.77 | 5.15 | 0.88 | 0 | 5.5 | 6.1 | 6.3 | 6.0 | 6.4 | 5.8 | 6.4 |
| hsa-asg-12460 | hsa-asg-12460_st2 | 6.79 | 6.95 | 6.87 | 0.11 | 100 | 7.4 | 8.4 | 8.2 | 7.4 | 8.2 | 7.5 | 7.7 |
| hsa-asg-8271 | hsa-asg-8271_st2 | 5.16 | 5.59 | 5.38 | 0.30 | 0 | 6.0 | 6.2 | 6.4 | 6.2 | 6.5 | 6.2 | 7.0 |
| hsa-asg-14186 | hsa-asg-14186_st2 | 3.37 | 4.64 | 4.01 | 0.89 | 0 | 4.8 | 4.7 | 4.8 | 4.9 | 5.1 | 5.6 | 5.1 |
| hsa-asg-10197 | hsa-asg-10197_st2 | 5.67 | 6.43 | 6.05 | 0.54 | 50 | 6.4 | 7.3 | 7.1 | 7.3 | 6.6 | 6.8 | 7.8 |
| hsa-asg-4599 | hsa-asg-4599_st1 | 4.04 | 5.43 | 4.73 | 0.99 | 50 | 5.6 | 5.5 | 5.7 | 6.1 | 5.9 | 5.8 | 5.7 |
| hsa-asg-3231 | hsa-asg-3231_st2 | 10.04 | 10.79 | 10.42 | 0.53 | 100 | 11.0 | 11.8 | 11.6 | 11.5 | 11.2 | 11.5 | 11.6 |
| hsa-asg-12996 | hsa-asg-12996_st1 | 5.52 | 5.98 | 5.75 | 0.33 | 50 | 6.7 | 6.3 | 6.7 | 7.1 | 6.7 | 6.8 | 7.2 |
| hsa-asg-10041 | hsa-asg-10041_st1 | 3.68 | 4.40 | 4.04 | 0.51 | 0 | 5.5 | 5.4 | 4.4 | 4.7 | 5.0 | 5.3 | 5.3 |
| hsa-asg-4515 | hsa-asg-4515_st1 | 3.78 | 4.47 | 4.12 | 0.49 | 0 | 4.9 | 5.1 | 4.7 | 4.9 | 5.2 | 5.5 | 5.9 |
| hsa-asg-7471 | hsa-asg-7471_st1 | 4.99 | 4.96 | 4.97 | 0.02 | 0 | 6.4 | 6.0 | 5.7 | 6.0 | 6.0 | 5.9 | 6.2 |
| hsa-asg-14189 | hsa-asg-14189_st2 | 11.06 | 10.84 | 10.95 | 0.15 | 100 | 11.8 | 12.3 | 12.4 | 11.7 | 11.7 | 12.2 | 12.1 |
| hsa-asg-9530 | hsa-asg-9530_st2 | 10.78 | 11.83 | 11.31 | 0.74 | 100 | 12.2 | 12.5 | 12.6 | 12.4 | 12.0 | 12.3 | 12.6 |
| hsa-asg-2046 | hsa-asg-2046_st2 | 3.15 | 4.24 | 3.69 | 0.77 | 0 | 4.5 | 5.0 | 5.2 | 4.9 | 4.8 | 4.1 | 4.8 |
| hsa-asg-5467 | hsa-asg-5467_st1 | 4.80 | 3.85 | 4.33 | 0.67 | 0 | 5.4 | 5.9 | 5.7 | 5.3 | 5.6 | 4.3 | 5.7 |
| hsa-asg-11096 | hsa-asg-11096_st1 | 4.26 | 5.52 | 4.89 | 0.89 | 0 | 6.0 | 5.9 | 6.0 | 5.7 | 5.9 | 5.7 | 6.6 |
| hsa-miR246 | hsa-miR246_st2 | 4.26 | 5.00 | 4.63 | 0.52 | 0 | 5.9 | 5.6 | 5.3 | 5.6 | 5.8 | 5.2 | 6.6 |
| hsa-asg-1261 | hsa-asg-1261_st1 | 3.87 | 5.16 | 4.52 | 0.92 | 0 | 5.1 | 5.8 | 5.6 | 6.0 | 5.4 | 5.8 | 5.6 |
| hsa-asg-10183 | hsa-asg-10183_st1 | 3.58 | 4.53 | 4.05 | 0.67 | 0 | 4.7 | 5.1 | 5.3 | 5.3 | 5.0 | 5.0 | 5.7 |
| hsa-asg-9729 | hsa-asg-9729_st2 | 5.75 | 5.35 | 5.55 | 0.29 | 50 | 6.6 | 6.8 | 7.0 | 6.4 | 6.7 | 6.7 | 6.4 |
| hsa-cand588 | hsa-cand588_st1 | 5.55 | 5.49 | 5.52 | 0.04 | 0 | 6.9 | 6.2 | 6.9 | 6.5 | 6.2 | 6.5 | 7.4 |
| hsa-asg-3509 | hsa-asg-3509_st1 | 4.40 | 5.42 | 4.91 | 0.72 | 0 | 5.4 | 6.6 | 6.6 | 5.8 | 5.9 | 5.4 | 6.6 |
| hsa-asg-6949 | hsa-asg-6949_st1 | 4.58 | 5.23 | 4.91 | 0.46 | 0 | 5.8 | 6.1 | 6.3 | 5.5 | 6.4 | 5.9 | 6.3 |
| hsa-asg-2353 | hsa-asg-2353_st1 | 3.26 | 3.90 | 3.58 | 0.45 | 0 | 5.1 | 4.4 | 4.3 | 4.8 | 5.3 | 4.2 | 5.0 |
| hsa-miR-594 | hsa-miR-594_st2 | 7.32 | 7.23 | 7.28 | 0.06 | 0 | 8.2 | 7.3 | 9.5 | 8.5 | 8.5 | 8.5 | 8.5 |
| hsa-asg-6761 | hsa-asg-6761_st1 | 3.37 | 4.47 | 3.92 | 0.77 | 0 | 4.9 | 4.9 | 5.4 | 4.6 | 5.6 | 5.0 | 5.2 |
| hsa-asg-11373 | hsa-asg-11373_st1 | 6.92 | 6.59 | 6.75 | 0.23 | 0 | 7.2 | 8.4 | 8.5 | 7.4 | 8.2 | 7.9 | 7.8 |
| hsa-cand190 | hsa-cand190_st1 | 3.68 | 4.02 | 3.85 | 0.24 | 0 | 4.6 | 5.2 | 5.3 | 5.4 | 4.5 | 5.0 | 5.0 |
| hsa-asg-9403 | hsa-asg-9403_st2 | 6.91 | 7.88 | 7.39 | 0.68 | 100 | 7.9 | 8.3 | 9.3 | 8.6 | 8.5 | 8.4 | 8.8 |
| hsa-asg-7275 | hsa-asg-7275_st2 | 3.37 | 4.89 | 4.13 | 1.07 | 50 | 5.4 | 5.0 | 5.7 | 5.5 | 5.6 | 5.3 | 4.7 |
| hsa-asg-6880 | hsa-asg-6880_st1 | 3.87 | 5.56 | 4.71 | 1.20 | 0 | 6.5 | 5.8 | 5.5 | 5.8 | 5.5 | 5.9 | 6.3 |
| hsa-asg-11893 | hsa-asg-11893_st2 | 6.43 | 6.95 | 6.69 | 0.36 | 100 | 7.6 | 7.8 | 7.9 | 8.0 | 7.6 | 7.8 | 8.3 |
| hsa-asg-271 | hsa-asg-271_st1 | 2.77 | 3.77 | 3.27 | 0.70 | 0 | 4.2 | 4.5 | 4.3 | 4.5 | 4.6 | 4.2 | 4.9 |
| hsa-asg-8917 | hsa-asg-8917_st2 | 5.78 | 6.75 | 6.26 | 0.69 | 50 | 6.4 | 8.0 | 8.1 | 7.1 | 7.5 | 7.4 | 7.7 |
| hsa-asg-2273 | hsa-asg-2273_st1 | 3.78 | 3.94 | 3.86 | 0.11 | 0 | 4.7 | 4.7 | 5.4 | 5.8 | 6.0 | 4.2 | 4.6 |
| hsa-asg-11310 | hsa-asg-11310_st2 | 5.20 | 4.91 | 5.06 | 0.20 | 0 | 6.1 | 6.5 | 6.9 | 5.6 | 6.3 | 6.3 | 6.2 |
| hsa-asg-4924 | hsa-asg-4924_st2 | 4.26 | 4.06 | 4.16 | 0.14 | 0 | 5.8 | 4.9 | 5.1 | 5.7 | 5.4 | 5.0 | 5.7 |
| hsa-asg-2750 | hsa-asg-2750_st2 | 9.29 | 11.25 | 10.27 | 1.38 | 100 | 11.2 | 11.7 | 11.6 | 11.6 | 11.2 | 11.3 | 11.9 |
| hsa-asg-7009 | hsa-asg-7009_st1 | 4.19 | 5.69 | 4.94 | 1.06 | 0 | 5.7 | 6.2 | 7.2 | 5.8 | 6.3 | 5.9 | 6.2 |
| hsa-asg-1305 | hsa-asg-1305_st2 | 4.26 | 4.79 | 4.53 | 0.38 | 0 | 5.1 | 6.3 | 5.6 | 6.3 | 5.3 | 5.3 | 6.3 |
| hsa-asg-7688 | hsa-asg-7688_st1 | 4.85 | 5.43 | 5.14 | 0.41 | 50 | 6.4 | 6.0 | 6.5 | 6.2 | 6.4 | 6.3 | 6.8 |
| hsa-asg-4469 | hsa-asg-4469_st1 | 5.31 | 6.58 | 5.95 | 0.89 | 50 | 7.1 | 7.3 | 7.5 | 6.8 | 7.2 | 7.1 | 7.5 |
| hsa-miR257 | hsa-miR257_st1 | 7.57 | 8.30 | 7.93 | 0.52 | 100 | 9.7 | 9.0 | 8.2 | 9.5 | 8.7 | 9.2 | 9.9 |
| hsa-asg-6457 | hsa-asg-6457_st2 | 3.37 | 4.13 | 3.75 | 0.54 | 0 | 4.2 | 4.6 | 5.6 | 5.1 | 5.4 | 5.4 | 4.8 |
| hsa-asg-14197_st1 | hsa-asg-14197_st1 | 8.23 | 8.54 | 8.39 | 0.22 | 100 | 9.2 | 10.2 | 10.3 | 9.8 | 9.4 | 8.7 | 10.0 |
| hsa-asg-12666 | hsa-asg-12666_st2 | 3.78 | 4.40 | 4.09 | 0.44 | 0 | 5.0 | 5.4 | 6.0 | 5.3 | 5.2 | 5.0 | 5.7 |
| hsa-asg-6357 | hsa-asg-6357_st1 | 3.78 | 5.50 | 4.64 | 1.22 | 0 | 6.5 | 5.5 | 6.2 | 5.7 | 5.9 | 5.2 | 6.4 |
| hsa-asg-2824 | hsa-asg-2824_st2 | 4.70 | 4.50 | 4.60 | 0.14 | 0 | 6.1 | 6.3 | 6.8 | 4.8 | 5.8 | 5.7 | 5.7 |
| hsa-asg-12339 | hsa-asg-12339_st1 | 5.04 | 6.16 | 5.60 | 0.80 | 50 | 6.6 | 7.0 | 6.3 | 7.0 | 6.6 | 6.9 | 8.0 |
| hsa-asg-12765 | hsa-asg-12765_st2 | 3.78 | 4.10 | 3.94 | 0.22 | 0 | 4.6 | 4.8 | 4.9 | 5.6 | 6.0 | 5.9 | 4.6 |
| hsa-asg-7319 | hsa-asg-7319_st2 | 3.87 | 4.61 | 4.24 | 0.53 | 0 | 5.6 | 5.3 | 5.5 | 5.5 | 5.7 | 5.3 | 5.9 |
| hsa-asg-3829 | hsa-asg-3829_st1 | 2.51 | 4.17 | 3.34 | 1.17 | 0 | 4.0 | 4.6 | 4.7 | 4.8 | 5.4 | 4.8 | 4.4 |
| hsa-asg-3070 | hsa-asg-3070_st2 | 3.68 | 4.20 | 3.94 | 0.37 | 0 | 4.6 | 5.1 | 5.9 | 5.6 | 5.8 | 5.4 | 5.0 |
| hsa-asg-2343 | hsa-asg-2343_st2 | 5.45 | 3.32 | 4.39 | 1.51 | 0 | 6.1 | 5.6 | 6.1 | 5.5 | 6.2 | 5.3 | 5.6 |
| hsa-asg-8018 | hsa-asg-8018_st1 | 3.78 | 4.00 | 3.89 | 0.16 | 0 | 6.1 | 4.9 | 5.3 | 5.0 | 5.1 | 5.3 | 5.2 |
| hsa-asg-1268 | hsa-asg-1268_st1 | 2.51 | 3.10 | 2.81 | 0.41 | 0 | 4.1 | 4.0 | 3.2 | 4.5 | 4.1 | 4.8 | 4.9 |
| hsa-asg-13693 | hsa-asg-13693_st2 | 4.75 | 4.54 | 4.64 | 0.15 | 0 | 5.8 | 6.1 | 6.3 | 5.9 | 6.0 | 6.1 | 6.2 |
| hsa-asg-7532 | hsa-asg-7532_st2 | 4.19 | 4.37 | 4.28 | 0.13 | 0 | 4.6 | 5.6 | 6.4 | 4.8 | 6.5 | 6.0 | 5.8 |
| hsa-asg-925 | hsa-asg-925_st1 | 6.36 | 5.06 | 5.71 | 0.92 | 50 | 8.1 | 7.0 | 7.1 | 7.1 | 6.2 | 7.0 | 7.8 |
| hsa-asg-3712 | hsa-asg-3712_st1 | 4.46 | 6.23 | 5.35 | 1.25 | 0 | 5.7 | 7.4 | 7.5 | 6.6 | 7.0 | 6.7 | 6.9 |
| hsa-asg-12346 | hsa-asg-12346_st2 | 5.67 | 5.76 | 5.71 | 0.06 | 0 | 6.4 | 7.4 | 7.2 | 6.7 | 7.9 | 7.2 | 7.6 |
| hsa-asg-14233 | hsa-asg-14233_st1 | 7.55 | 8.37 | 7.96 | 0.58 | 100 | 8.8 | 9.8 | 9.1 | 9.4 | 9.9 | 9.4 | 9.9 |
| hsa-asg-13976 | hsa-asg-13976_st2 | 4.33 | 4.39 | 4.36 | 0.04 | 0 | 5.6 | 5.8 | 6.4 | 5.7 | 6.0 | 5.8 | 5.7 |
| hsa-asg-14150 | hsa-asg-14150_st1 | 5.42 | 5.53 | 5.48 | 0.08 | 0 | 6.0 | 7.1 | 7.0 | 6.5 | 7.2 | 7.5 | 7.7 |
| hsa-asg-6717 | hsa-asg-6717_st2 | 5.42 | 5.47 | 5.44 | 0.04 | 0 | 6.2 | 7.3 | 7.5 | 6.5 | 7.3 | 6.7 | 7.2 |
| hsa-asg-10981 | hsa-asg-10981_st1 | 3.48 | 4.17 | 3.83 | 0.49 | 0 | 5.2 | 5.5 | 5.8 | 5.7 | 6.0 | 4.8 | 4.3 |
| hsa-asg-6247 | hsa-asg-6247_st1 | 7.97 | 8.69 | 8.33 | 0.51 | 100 | 9.7 | 9.9 | 10.2 | 9.9 | 9.2 | 9.8 | 10.2 |
| hsa-asg-7782 | hsa-asg-7782_st2 | 4.95 | 5.66 | 5.30 | 0.51 | 0 | 5.6 | 7.5 | 7.5 | 6.9 | 6.9 | 6.0 | 7.4 |
| hsa-asg-2365 | hsa-asg-2365_st1 | 3.78 | 4.39 | 4.08 | 0.43 | 0 | 5.6 | 5.5 | 5.8 | 5.3 | 5.8 | 5.8 | 5.7 |
| hsa-asg-11896 | hsa-asg-11896_st2 | 9.72 | 11.92 | 10.82 | 1.56 | 100 | 12.3 | 12.6 | 12.7 | 12.4 | 11.9 | 12.2 | 12.7 |
| hsa-asg-3854 | hsa-asg-3854_st1 | 4.11 | 4.24 | 4.18 | 0.09 | 0 | 5.9 | 6.1 | 6.1 | 5.5 | 5.7 | 5.6 | 5.6 |
| hsa-asg-9508 | hsa-asg-9508_st1 | 8.74 | 8.94 | 8.84 | 0.14 | 0 | 9.4 | 10.9 | 11.1 | 9.9 | 10.3 | 10.7 | 10.8 |
| hsa-asg-13646 | hsa-asg-13646_st1 | 5.91 | 5.77 | 5.84 | 0.10 | 0 | 7.4 | 7.3 | 6.9 | 7.4 | 7.4 | 7.5 | 8.5 |
| hsa-asg-12702 | hsa-asg-12702_st1 | 6.56 | 4.77 | 5.67 | 1.27 | 50 | 7.4 | 7.0 | 8.6 | 6.0 | 7.1 | 7.5 | 7.6 |
| hsa-cand345 | hsa-cand345_st1 | 4.33 | 4.55 | 4.44 | 0.16 | 0 | 6.3 | 5.6 | 5.7 | 6.2 | 6.2 | 5.9 | 6.8 |
| hsa-asg-6413 | hsa-asg-6413_st2 | 4.19 | 3.85 | 4.02 | 0.24 | 0 | 5.1 | 5.9 | 6.5 | 4.7 | 6.1 | 5.8 | 5.7 |
| hsa-asg-9852 | hsa-asg-9852_st1 | 5.12 | 3.60 | 4.36 | 1.07 | 0 | 5.5 | 6.4 | 6.3 | 6.0 | 6.2 | 6.0 | 5.8 |
| hsa-asg-10473 | hsa-asg-10473_st1 | 3.95 | 4.17 | 4.06 | 0.15 | 0 | 5.8 | 5.9 | 5.7 | 5.8 | 5.3 | 5.8 | 5.9 |
| hsa-asg-12105 | hsa-asg-12105_st2 | 3.02 | 4.65 | 3.84 | 1.15 | 0 | 5.4 | 5.9 | 4.5 | 6.2 | 6.2 | 5.6 | 4.9 |
| hsa-asg-2872 | hsa-asg-2872_st2 | 8.15 | 7.95 | 8.05 | 0.14 | 100 | 9.3 | 9.9 | 10.5 | 8.9 | 10.2 | 9.6 | 9.9 |
| hsa-asg-8617 | hsa-asg-8617_st1 | 4.19 | 5.65 | 4.92 | 1.03 | 0 | 5.4 | 7.0 | 7.2 | 6.8 | 6.7 | 6.3 | 7.2 |
| hsa-asg-797 | hsa-asg-797_st2 | 3.37 | 3.81 | 3.59 | 0.31 | 0 | 5.3 | 5.4 | 5.1 | 5.4 | 5.4 | 5.1 | 5.5 |
| hsa-asg-7149 | hsa-asg-7149_st2 | 4.58 | 4.57 | 4.58 | 0.01 | 0 | 5.6 | 6.6 | 6.6 | 5.2 | 7.0 | 6.4 | 6.8 |
| hsa-asg-12973 | hsa-asg-12973_st2 | 4.26 | 4.34 | 4.30 | 0.06 | 0 | 5.6 | 6.1 | 6.5 | 5.8 | 6.1 | 6.1 | 6.4 |
| hsa-asg-12902 | hsa-asg-12902_st1 | 5.75 | 4.34 | 5.05 | 1.00 | 0 | 7.7 | 7.3 | 6.6 | 6.7 | 7.0 | 5.9 | 6.6 |
| hsa-asg-13097 | hsa-asg-13097_st1 | 3.48 | 2.98 | 3.23 | 0.35 | 0 | 3.4 | 4.2 | 5.3 | 4.8 | 5.8 | 5.8 | 6.2 |
| hsa-asg-10861 | hsa-asg-10861_st2 | 3.87 | 4.29 | 4.08 | 0.30 | 0 | 5.6 | 6.3 | 6.4 | 5.6 | 6.3 | 5.6 | 5.7 |
| hsa-asg-8682 | hsa-asg-8682_st2 | 4.40 | 5.16 | 4.78 | 0.54 | 50 | 4.9 | 7.4 | 7.6 | 5.8 | 6.9 | 6.7 | 7.3 |
| hsa-asg-13205 | hsa-asg-13205_st1 | 4.95 | 5.36 | 5.15 | 0.29 | 0 | 5.5 | 7.3 | 7.0 | 6.4 | 7.7 | 7.5 | 7.8 |
| hsa-cand768 | hsa-cand768_st1 | 9.07 | 9.92 | 9.49 | 0.60 | 0 | 11.1 | 11.7 | 11.5 | 11.8 | 10.7 | 10.8 | 12.0 |
| hsa-asg-12759 | hsa-asg-12759_st2 | 2.64 | 3.81 | 3.23 | 0.83 | 0 | 4.6 | 5.7 | 5.8 | 3.7 | 5.8 | 4.6 | 5.8 |
| hsa-asg-7080 | hsa-asg-7080_st1 | 2.00 | 3.63 | 2.81 | 1.15 | 0 | 4.1 | 4.7 | 5.0 | 4.9 | 5.1 | 4.4 | 5.0 |
| hsa-asg-3360 | hsa-asg-3360_st2 | 4.58 | 5.44 | 5.01 | 0.61 | 0 | 7.4 | 6.6 | 6.7 | 6.5 | 6.6 | 7.5 | 7.3 |
| hsa-asg-10149 | hsa-asg-10149_st1 | 5.91 | 5.44 | 5.67 | 0.33 | 0 | 7.4 | 7.7 | 8.4 | 6.8 | 7.8 | 7.5 | 7.8 |
| hsa-asg-11612 | hsa-asg-11612_st1 | 3.58 | 4.08 | 3.83 | 0.35 | 0 | 5.4 | 6.0 | 5.7 | 6.4 | 5.6 | 4.7 | 6.6 |
| hsa-asg-6138 | hsa-asg-6138_st1 | 3.15 | 3.53 | 3.34 | 0.27 | 0 | 4.5 | 5.9 | 5.6 | 5.1 | 5.1 | 5.5 | 5.6 |
| hsa-asg-13244 | hsa-asg-13244_st1 | 5.31 | 4.39 | 4.85 | 0.65 | 0 | 7.7 | 7.0 | 7.1 | 6.6 | 6.9 | 6.2 | 6.4 |
| hsa-cand965 | hsa-cand965_st1 | 5.08 | 5.50 | 5.29 | 0.30 | 0 | 7.2 | 7.9 | 7.7 | 5.9 | 7.6 | 7.2 | 7.5 |
| hsa-asg-13230 | hsa-asg-13230_st2 | 5.31 | 4.34 | 4.83 | 0.69 | 0 | 7.1 | 7.0 | 6.7 | 6.8 | 6.8 | 6.7 | 6.8 |
| hsa-asg-14245 | hsa-asg-14245_st1 | 10.60 | 9.49 | 10.04 | 0.78 | 100 | 12.9 | 11.3 | 12.1 | 12.1 | 11.6 | 12.1 | 12.3 |
| hsa-asg-10263 | hsa-asg-10263_st2 | 2.77 | 4.40 | 3.59 | 1.15 | 0 | 5.7 | 5.3 | 5.0 | 5.9 | 5.3 | 6.4 | 5.9 |
| hsa-asg-21 | hsa-asg-21_st2 | 3.87 | 4.10 | 3.98 | 0.16 | 0 | 5.7 | 5.8 | 6.9 | 4.6 | 6.6 | 6.3 | 6.4 |
| hsa-asg-12923 | hsa-asg-12923_st1 | 3.37 | 4.17 | 3.77 | 0.56 | 0 | 5.0 | 6.2 | 7.0 | 4.5 | 6.5 | 5.9 | 6.0 |
| hsa-asg-4002 | hsa-asg-4002_st1 | 4.11 | 5.96 | 5.04 | 1.31 | 50 | 5.8 | 7.6 | 7.9 | 6.0 | 7.7 | 7.2 | 7.5 |
| hsa-asg-9298 | hsa-asg-9298_st2 | 1.88 | 2.86 | 2.37 | 0.70 | 0 | 3.4 | 4.7 | 5.2 | 2.6 | 4.7 | 4.8 | 5.9 |
| hsa-asg-13258 | hsa-asg-13258_st2 | 6.02 | 5.45 | 5.74 | 0.40 | 0 | 7.8 | 7.7 | 7.7 | 7.6 | 7.5 | 7.8 | 8.8 |
| hsa-asg-13260 | hsa-asg-13260_st1 | 6.62 | 5.72 | 6.17 | 0.64 | 50 | 8.6 | 8.3 | 8.6 | 7.7 | 8.2 | 8.1 | 8.7 |
| hsa-asg-14170 | hsa-asg-14170_st1 | 3.26 | 5.16 | 4.21 | 1.35 | 0 | 6.5 | 6.7 | 6.1 | 7.4 | 6.9 | 5.5 | 5.5 |
| hsa-asg-242 | hsa-asg-242_st2 | 2.64 | 4.22 | 3.43 | 1.12 | 0 | 3.3 | 5.7 | 5.6 | 6.7 | 6.7 | 6.3 | 5.4 |
| hsa-asg-870 | hsa-asg-870_st1 | 4.40 | 3.30 | 3.85 | 0.78 | 0 | 4.4 | 6.8 | 7.5 | 5.2 | 6.4 | 6.0 | 6.5 |
| hsa-asg-4557 | hsa-asg-4557_st2 | 4.75 | 5.83 | 5.29 | 0.76 | 50 | 7.1 | 7.2 | 7.5 | 7.6 | 8.2 | 7.3 | 8.0 |
| hsa-asg-5303 | hsa-asg-5303_st1 | 3.95 | 5.42 | 4.69 | 1.04 | 0 | 6.5 | 8.0 | 6.8 | 7.2 | 7.2 | 6.8 | 6.4 |
| hsa-asg-8208 | hsa-asg-8208_st1 | 2.64 | 4.90 | 3.77 | 1.60 | 0 | 5.4 | 6.4 | 6.8 | 4.8 | 6.1 | 5.9 | 7.1 |
| hsa-miR157 | hsa-miR157_st2 | 6.98 | 6.24 | 6.61 | 0.52 | 100 | 8.9 | 8.6 | 8.9 | 8.9 | 8.2 | 9.3 | 9.7 |
| hsa-asg-818 | hsa-asg-818_st1 | 2.00 | 3.98 | 2.99 | 1.40 | 0 | 4.7 | 5.3 | 4.8 | 6.8 | 5.2 | 3.8 | 7.0 |
| hsa-asg-13248 | hsa-asg-13248_st1 | 6.94 | 6.52 | 6.73 | 0.30 | 100 | 9.9 | 8.9 | 8.6 | 9.2 | 8.9 | 8.9 | 10.1 |
| hsa-asg-562 | hsa-asg-562_st1 | 8.05 | 7.05 | 7.55 | 0.70 | 100 | 10.1 | 9.6 | 10.2 | 10.2 | 9.7 | 10.3 | 10.8 |
| hsa-asg-13937 | hsa-asg-13937_st1 | 5.35 | 7.30 | 6.33 | 1.38 | 50 | 8.3 | 9.6 | 9.3 | 8.0 | 8.7 | 8.9 | 9.6 |
| hsa-asg-13304 | hsa-asg-13304_st2 | 3.26 | 4.62 | 3.94 | 0.96 | 0 | 6.1 | 6.4 | 7.1 | 6.3 | 6.8 | 6.3 | 7.2 |
| hsa-asg-13354 | hsa-asg-13354_st1 | 5.86 | 6.09 | 5.97 | 0.17 | 0 | 8.5 | 8.6 | 8.9 | 9.2 | 7.9 | 7.6 | 10.0 |
| hsa-asg-5304 | hsa-asg-5304_st1 | 7.67 | 7.58 | 7.63 | 0.06 | 50 | 11.0 | 10.1 | 9.9 | 10.2 | 10.2 | 10.1 | 10.6 |
| hsa-miR154 | hsa-miR154_st1 | 2.12 | 3.32 | 2.72 | 0.85 | 0 | 3.8 | 5.0 | 5.5 | 5.2 | 6.2 | 5.8 | 6.5 |
| hsa-asg-10883 | hsa-asg-10883_st1 | 3.87 | 4.68 | 4.27 | 0.57 | 0 | 6.3 | 7.5 | 7.2 | 6.3 | 7.0 | 7.1 | 7.4 |
| hsa-asg-10387 | hsa-asg-10387_st1 | 4.11 | 5.98 | 5.05 | 1.32 | 50 | 6.3 | 8.4 | 8.7 | 6.1 | 8.7 | 8.0 | 8.2 |
| hsa-asg-10676 | hsa-asg-10676_st1 | 3.78 | 3.43 | 3.60 | 0.25 | 0 | 4.8 | 6.6 | 5.9 | 7.1 | 5.8 | 6.6 | 8.0 |
| hsa-asg-7074 | hsa-asg-7074_st1 | 8.69 | 6.17 | 7.43 | 1.78 | 50 | 9.9 | 10.3 | 10.5 | 9.8 | 10.3 | 10.3 | 10.8 |
| hsa-asg-13308 | hsa-asg-13308_st2 | 7.09 | 7.50 | 7.30 | 0.29 | 0 | 11.0 | 10.1 | 9.6 | 10.1 | 10.0 | 9.9 | 10.6 |
| hsa-asg-10580 | hsa-asg-10580_st1 | 4.58 | 4.81 | 4.69 | 0.16 | 0 | 7.6 | 7.5 | 7.7 | 8.3 | 7.1 | 6.0 | 9.0 |
| hsa-asg-14160 | hsa-asg-14160_st1 | 2.77 | 2.14 | 2.46 | 0.45 | 0 | 5.6 | 5.5 | 5.0 | 4.0 | 6.0 | 6.0 | 5.8 |
| hsa-asg-4205 | hsa-asg-4205_st2 | 2.90 | 2.95 | 2.93 | 0.04 | 0 | 4.4 | 6.6 | 6.4 | 4.5 | 6.8 | 6.3 | 6.6 |
| hsa-asg-10666 | hsa-asg-10666_st1 | 2.51 | 3.96 | 3.24 | 1.02 | 0 | 6.2 | 6.8 | 7.1 | 4.6 | 6.8 | 5.8 | 6.4 |
| hsa-asg-13279 | hsa-asg-13279_st1 | 4.40 | 4.11 | 4.26 | 0.20 | 0 | 8.1 | 7.4 | 7.3 | 7.4 | 7.2 | 6.9 | 7.7 |
| hsa-asg-14133 | hsa-asg-14133_st2 | 3.26 | 5.71 | 4.49 | 1.73 | 0 | 8.8 | 6.5 | 6.7 | 8.7 | 6.7 | 7.8 | 8.7 |
| hsa-asg-13237 | hsa-asg-13237_st1 | 3.48 | 3.63 | 3.55 | 0.10 | 0 | 7.4 | 7.0 | 7.3 | 6.5 | 7.6 | 7.0 | 7.5 |
| hsa-miR-100 | hsa-cand375_st1 | 10.31 | 11.30 | 10.81 | 0.70 | 100 | 11.7 | 12.2 | 12.1 | 12.4 | 12.8 | 12.0 | 12.3 |
| hsa-miR-126 | hsa-cand497_st1 | 10.16 | 10.99 | 10.57 | 0.59 | 100 | 12.2 | 12.8 | 12.8 | 12.4 | 12.6 | 12.3 | 12.5 |
| hsa-miR-140 | hsa-asg-14239_st1 | 5.72 | 6.47 | 6.10 | 0.53 | 50 | 8.4 | 7.9 | 6.6 | 7.7 | 7.1 | 7.6 | 8.6 |
| hsa-miR-199a* | hsa-asg-14140_st1 | 10.49 | 10.90 | 10.70 | 0.29 | 100 | 12.6 | 13.0 | 13.0 | 12.7 | 13.0 | 12.7 | 12.8 |
| hsa-miR-224 | hsa-asg-14247_st1 | 6.65 | 7.09 | 6.87 | 0.31 | 100 | 7.7 | 8.6 | 8.6 | 9.1 | 9.7 | 9.3 | 9.2 |
| hsa-miR-29b | hsa-asg-14229_st2 | 8.62 | 7.70 | 8.16 | 0.65 | 100 | 11.3 | 11.0 | 10.7 | 11.0 | 10.6 | 10.3 | 11.2 |
| hsa-miR-331 | hsa-asg-14205_st1 | 4.52 | 5.29 | 4.90 | 0.54 | 0 | 7.8 | 7.1 | 6.9 | 7.1 | 7.4 | 7.4 | 8.1 |
| hsa-miR-365 | hsa-cand708_st1 | 3.58 | 3.81 | 3.70 | 0.16 | 0 | 5.0 | 4.8 | 4.4 | 4.8 | 5.4 | 4.6 | 5.0 |
| hsa-miR-365 | hsa-asg-13156_st1 | 4.26 | 5.18 | 4.72 | 0.65 | 0 | 4.9 | 6.5 | 6.1 | 6.3 | 6.7 | 5.0 | 6.5 |
| hsa-miR-376a | hsa-asg-10049_st1 | 3.68 | 3.43 | 3.56 | 0.18 | 0 | 3.6 | 4.4 | 4.4 | 4.3 | 5.0 | 5.4 | 5.1 |
| hsa-miR-421 | hsa-asg-5033_st2 | 7.27 | 7.77 | 7.52 | 0.35 | 100 | 7.1 | 6.5 | 6.1 | 7.5 | 6.2 | 6.6 | 7.7 |
| hsa-miR-503 | hsa-miR141_st1 | 8.15 | 8.02 | 8.09 | 0.09 | 100 | 6.6 | 6.3 | 6.8 | 7.8 | 6.6 | 7.7 | 7.5 |
| hsa-miR-551b | hsa-miR167_st2 | 3.37 | 2.48 | 2.93 | 0.63 | 0 | 3.7 | 4.0 | 4.0 | 2.6 | 4.3 | 3.5 | 4.3 |
| hsa-miR-592 | hsa-asg-4400_st1 | 3.02 | 4.72 | 3.87 | 1.20 | 0 | 3.2 | 2.7 | 2.8 | 3.4 | 3.3 | 2.9 | 3.4 |

| | LNneg | | | LNposB vs LNneg | | |
|---|---|---|---|---|---|---|
| MicroRNA | Mean | SD | % | ttest | Log2Diff | FC |
| hsa-miR-211 | 4.1 | 1.18 | 0.0 | 3.53E−04 | 5.70 | 52.1 |
| hsa-miR-513 | 5.4 | 1.22 | 14.3 | 1.33E−03 | 4.90 | 29.9 |
| hsa-miR-509 | 6.4 | 0.84 | 85.7 | 2.32E−04 | 4.81 | 28.0 |
| hsa-miR-584 | 5.5 | 0.42 | 14.3 | 3.45E−05 | 2.92 | 7.6 |
| hsa-miR-204 | 5.9 | 1.06 | 71.4 | 2.85E−02 | 2.67 | 6.4 |
| hsa-miR-132 | 5.6 | 1.13 | 0.0 | 2.30E−02 | 2.50 | 5.6 |
| hsa-miR-506 | 6.5 | 0.41 | 100.0 | 3.73E−04 | 2.49 | 5.6 |
| hsa-miR-508 | 6.6 | 0.47 | 100.0 | 1.04E−03 | 2.13 | 4.4 |
| hsa-miR-767-5p | 3.0 | 0.55 | 0.0 | 3.80E−03 | 2.12 | 4.3 |
| hsa-miR-105 | 3.5 | 0.58 | 0.0 | 1.31E−02 | 1.78 | 3.4 |
| hsa-miR-450 | 3.9 | 0.58 | 0.0 | 3.64E−02 | 1.31 | 2.5 |
| hsa-miR-514 | 3.0 | 0.07 | 0.0 | 7.72E−06 | 1.20 | 2.3 |
| hsa-miR-503 | 6.6 | 0.59 | 42.9 | 3.59E−02 | 1.15 | 2.2 |
| hsa-miR-542-3p | 5.8 | 0.28 | 71.4 | 8.85E−03 | 0.77 | 1.7 |
| hsa-miR-638 | 12.7 | 0.07 | 100.0 | 2.33E−02 | 0.26 | 1.2 |
| hsa-miR-26b | 12.4 | 0.21 | 100.0 | 2.12E−02 | −0.46 | 1.4 |
| hsa-miR-221 | 12.6 | 0.20 | 100.0 | 3.87E−02 | −0.78 | 1.7 |
| hsa-let-7i | 13.5 | 0.17 | 100.0 | 1.72E−04 | −0.95 | 1.9 |
| hsa-let-7b | 13.7 | 0.25 | 100.0 | 1.30E−03 | −0.96 | 1.9 |
| hsa-miR-125b | 12.8 | 0.20 | 100.0 | 1.46E−02 | −0.96 | 2.0 |
| hsa-miR-20a | 12.1 | 0.41 | 100.0 | 2.76E−02 | −1.00 | 2.0 |
| hsa-miR-93 | 10.9 | 0.42 | 100.0 | 1.57E−02 | −1.04 | 2.1 |
| hsa-miR-141 | 4.9 | 0.44 | 14.3 | 1.61E−02 | −1.05 | 2.1 |
| hsa-miR-128b | 10.8 | 0.36 | 100.0 | 5.23E−03 | −1.11 | 2.2 |
| hsa-miR-652 | 9.0 | 0.47 | 100.0 | 1.85E−02 | −1.11 | 2.2 |
| hsa-miR-27a | 11.4 | 0.29 | 100.0 | 1.31E−03 | −1.12 | 2.2 |
| hsa-miR-574 | 8.2 | 0.57 | 100.0 | 3.16E−02 | −1.14 | 2.2 |
| hsa-miR-146b | 12.6 | 0.42 | 100.0 | 8.81E−03 | −1.15 | 2.2 |
| hsa-miR-299-5p | 4.5 | 0.49 | 14.3 | 2.15E−02 | −1.15 | 2.2 |
| hsa-miR-214 | 8.5 | 0.46 | 100.0 | 1.22E−02 | −1.17 | 2.2 |
| hsa-miR-128a | 10.5 | 0.37 | 100.0 | 4.11E−03 | −1.19 | 2.3 |
| hsa-miR-185 | 9.9 | 0.53 | 100.0 | 2.08E−02 | −1.22 | 2.3 |
| hsa-miR-29a | 12.6 | 0.27 | 100.0 | 4.99E−03 | −1.26 | 2.4 |
| hsa-miR-365 | 6.1 | 0.55 | 71.4 | 1.93E−02 | −1.26 | 2.4 |
| hsa-miR-628 | 7.2 | 0.59 | 100.0 | 2.38E−02 | −1.26 | 2.4 |
| hsa-miR-24 | 13.2 | 0.25 | 100.0 | 2.46E−04 | −1.27 | 2.4 |
| hsa-miR-191 | 13.3 | 0.21 | 100.0 | 8.65E−05 | −1.29 | 2.4 |
| hsa-miR-339 | 6.7 | 0.44 | 85.7 | 5.70E−03 | −1.29 | 2.5 |
| hsa-miR-551b | 4.0 | 0.43 | 0.0 | 4.58E−03 | −1.31 | 2.5 |
| hsa-miR-30a-3p | 8.7 | 0.56 | 100.0 | 3.86E−02 | −1.32 | 2.5 |
| hsa-miR-103 | 12.9 | 0.24 | 100.0 | 2.16E−04 | −1.32 | 2.5 |
| hsa-miR-130b | 8.1 | 0.58 | 100.0 | 2.78E−02 | −1.33 | 2.5 |
| hsa-miR-107 | 12.8 | 0.24 | 100.0 | 1.69E−04 | −1.34 | 2.5 |
| hsa-miR-27b | 12.2 | 0.12 | 100.0 | 2.45E−04 | −1.34 | 2.5 |
| hsa-miR-376a | 4.7 | 0.37 | 0.0 | 1.94E−02 | −1.41 | 2.7 |
| hsa-miR-142-5p | 6.4 | 0.54 | 100.0 | 1.35E−02 | −1.41 | 2.7 |
| hsa-miR-140 | 7.4 | 0.60 | 100.0 | 2.40E−02 | −1.45 | 2.7 |
| hsa-miR-205 | 4.3 | 0.67 | 0.0 | 3.78E−02 | −1.48 | 2.8 |
| hsa-miR-100 | 12.1 | 0.43 | 100.0 | 5.64E−03 | −1.49 | 2.8 |
| hsa-miR-489 | 5.3 | 0.59 | 14.3 | 1.18E−02 | −1.49 | 2.8 |
| hsa-miR-10b | 12.3 | 0.19 | 100.0 | 6.73E−04 | −1.53 | 2.9 |
| hsa-miR-106b | 10.3 | 0.67 | 100.0 | 1.76E−02 | −1.54 | 2.9 |
| hsa-miR-320 | 10.6 | 0.41 | 100.0 | 1.95E−03 | −1.57 | 3.0 |
| hsa-miR-200b | 7.0 | 0.67 | 100.0 | 1.43E−02 | −1.61 | 3.1 |
| hsa-miR-19b | 8.5 | 0.52 | 100.0 | 7.33E−03 | −1.65 | 3.1 |
| hsa-miR-199b | 8.7 | 0.49 | 100.0 | 1.25E−02 | −1.67 | 3.2 |
| hsa-miR-148a | 11.8 | 0.28 | 100.0 | 4.62E−03 | −1.74 | 3.3 |
| hsa-miR-189 | 5.3 | 0.44 | 14.3 | 1.49E−02 | −1.75 | 3.4 |
| hsa-miR-155 | 13.7 | 0.14 | 100.0 | 4.28E−02 | −1.76 | 3.4 |
| hsa-miR-200c | 7.8 | 0.79 | 100.0 | 3.03E−02 | −1.76 | 3.4 |
| hsa-miR-203 | 5.8 | 0.71 | 28.6 | 1.73E−02 | −1.76 | 3.4 |
| hsa-miR-425-5p | 10.6 | 0.50 | 100.0 | 2.14E−03 | −1.77 | 3.4 |
| hsa-miR-197 | 9.7 | 0.37 | 100.0 | 6.33E−03 | −1.77 | 3.4 |
| hsa-miR-505 | 8.9 | 0.39 | 100.0 | 6.33E−04 | −1.80 | 3.5 |
| hsa-miR-101 | 7.4 | 0.82 | 100.0 | 2.30E−02 | −1.83 | 3.6 |
| hsa-miR-126 | 12.7 | 0.32 | 100.0 | 3.08E−04 | −1.85 | 3.6 |
| hsa-miR-186 | 7.8 | 0.50 | 100.0 | 7.09E−03 | −1.86 | 3.6 |
| hsa-miR-145 | 13.2 | 0.19 | 100.0 | 1.14E−04 | −1.86 | 3.6 |
| hsa-miR-30e-3p | 8.7 | 0.39 | 100.0 | 3.32E−04 | −1.92 | 3.8 |
| hsa-miR-497 | 7.6 | 0.28 | 57.1 | 4.94E−05 | −2.04 | 4.1 |
| hsa-miR-15a | 11.7 | 0.35 | 100.0 | 5.61E−04 | −2.06 | 4.2 |
| hsa-miR-342 | 13.6 | 0.19 | 100.0 | 3.53E−04 | −2.07 | 4.2 |
| hsa-miR-142-3p | 5.2 | 0.44 | 14.3 | 6.95E−04 | −2.08 | 4.2 |
| hsa-miR-486 | 8.0 | 0.49 | 100.0 | 9.10E−04 | −2.08 | 4.2 |
| hsa-miR-22 | 11.6 | 0.47 | 100.0 | 6.05E−04 | −2.11 | 4.3 |
| hsa-miR-199a* | 12.8 | 0.18 | 100.0 | 2.43E−06 | −2.15 | 4.4 |
| hsa-miR-484 | 8.4 | 0.31 | 100.0 | 5.59E−05 | −2.17 | 4.5 |
| hsa-miR-194 | 9.6 | 0.64 | 100.0 | 2.44E−03 | −2.20 | 4.6 |
| hsa-miR-331 | 8.6 | 0.58 | 100.0 | 1.76E−03 | −2.21 | 4.6 |
| hsa-miR-223 | 11.4 | 0.61 | 100.0 | 1.74E−03 | −2.24 | 4.7 |
| hsa-miR-150 | 13.1 | 0.30 | 100.0 | 1.45E−02 | −2.32 | 5.0 |
| hsa-miR-224 | 8.6 | 0.83 | 100.0 | 6.75E−03 | −2.35 | 5.1 |
| hsa-miR-625 | 9.2 | 0.68 | 100.0 | 4.30E−03 | −2.36 | 5.1 |
| hsa-miR-598 | 7.1 | 0.70 | 85.7 | 5.66E−03 | −2.48 | 5.6 |
| hsa-miR-139 | 9.4 | 0.45 | 100.0 | 1.84E−04 | −2.53 | 5.8 |
| hsa-miR-133a | 6.2 | 0.63 | 71.4 | 9.79E−04 | −2.62 | 6.1 |
| hsa-miR-133b | 5.3 | 0.81 | 14.3 | 7.44E−03 | −2.64 | 6.2 |
| hsa-miR-629 | 6.6 | 0.91 | 57.1 | 1.44E−02 | −2.65 | 6.3 |
| hsa-miR-99a | 11.4 | 0.46 | 100.0 | 1.01E−03 | −2.74 | 6.7 |
| hsa-miR-29b | 10.8 | 0.34 | 100.0 | 3.23E−05 | −2.76 | 6.8 |
| hsa-miR-195 | 12.9 | 0.15 | 100.0 | 7.00E−06 | −2.76 | 6.8 |
| hsa-miR-452 | 6.1 | 1.18 | 57.1 | 1.48E−02 | −2.81 | 7.0 |
| hsa-miR-215 | 7.0 | 0.57 | 100.0 | 6.95E−04 | −2.87 | 7.3 |
| hsa-miR-29c | 10.4 | 0.51 | 100.0 | 3.80E−04 | −2.88 | 7.4 |
| hsa-miR-17-3p | 6.8 | 0.63 | 85.7 | 5.15E−04 | −2.89 | 7.4 |
| hsa-miR-199a | 10.2 | 0.33 | 100.0 | 5.92E−05 | −2.92 | 7.5 |
| hsa-miR-7 | 9.8 | 0.64 | 100.0 | 4.08E−04 | −3.03 | 8.2 |
| hsa-miR-218 | 9.0 | 0.59 | 100.0 | 2.23E−04 | −3.07 | 8.4 |
| hsa-miR-425-3p | 6.5 | 0.59 | 42.9 | 2.67E−04 | −3.13 | 8.7 |
| hsa-miR-143 | 12.7 | 0.33 | 100.0 | 2.34E−05 | −3.17 | 9.0 |
| hsa-miR-192 | 10.6 | 0.61 | 100.0 | 7.77E−05 | −4.01 | 16.1 |
| hsa-miR-95 | 9.0 | 0.64 | 100.0 | 1.21E−04 | −4.16 | 17.9 |
| hsa-miR-335 | 9.3 | 0.61 | 100.0 | 3.59E−05 | −4.21 | 18.5 |
| hsa-miR-1 | 9.6 | 0.84 | 100.0 | 2.32E−04 | −4.32 | 20.0 |
| hsa-miR-31 | 10.5 | 1.63 | 100.0 | 6.41E−03 | −4.64 | 25.0 |
| hsa-asg-5638 | 3.6 | 0.77 | 0.0 | 1.47E−04 | 4.27 | 19.3 |
| hsa-asg-5630 | 4.0 | 1.22 | 14.3 | 1.36E−02 | 3.12 | 8.7 |
| hsa-asg-11338 | 4.0 | 0.36 | 0.0 | 3.15E−05 | 2.68 | 6.4 |
| hsa-asg-9186 | 5.2 | 0.53 | 0.0 | 2.61E−02 | 2.61 | 6.1 |
| hsa-asg-1946 | 2.7 | 0.44 | 0.0 | 3.89E−02 | 2.44 | 5.4 |
| hsa-asg-14190 | 2.8 | 0.55 | 0.0 | 4.05E−02 | 1.99 | 4.0 |
| hsa-asg-11966 | 3.5 | 0.96 | 0.0 | 2.90E−02 | 1.97 | 3.9 |
| hsa-asg-12271 | 4.5 | 0.29 | 0.0 | 3.39E−03 | 1.96 | 3.9 |
| hsa-asg-381 | 2.9 | 0.67 | 0.0 | 4.67E−02 | 1.94 | 3.8 |
| hsa-asg-4051 | 2.8 | 0.33 | 0.0 | 3.49E−02 | 1.90 | 3.7 |
| hsa-asg-8322 | 2.8 | 0.12 | 0.0 | 4.54E−02 | 1.85 | 3.6 |
| hsa-asg-12810 | 2.8 | 0.45 | 0.0 | 4.95E−02 | 1.79 | 3.5 |
| hsa-asg-11238 | 3.6 | 0.69 | 0.0 | 3.18E−02 | 1.65 | 3.1 |
| hsa-asg-10031 | 4.0 | 0.60 | 0.0 | 4.73E−02 | 1.48 | 2.8 |
| hsa-asg-9858 | 6.3 | 0.33 | 14.3 | 7.08E−03 | 1.39 | 2.6 |
| hsa-asg-12381 | 6.1 | 0.30 | 28.6 | 2.59E−02 | 1.26 | 2.4 |
| hsa-asg-2261 | 3.3 | 0.33 | 0.0 | 6.01E−03 | 1.21 | 2.3 |
| hsa-asg-8633 | 6.4 | 0.25 | 71.4 | 1.10E−02 | 1.20 | 2.3 |
| hsa-asg-9903 | 4.4 | 0.62 | 14.3 | 3.43E−02 | 1.20 | 2.3 |
| hsa-asg-13893 | 5.6 | 0.20 | 0.0 | 2.48E−02 | 1.18 | 2.3 |
| hsa-asg-4780 | 5.7 | 0.44 | 0.0 | 2.82E−02 | 1.14 | 2.2 |
| hsa-asg-11850 | 10.0 | 0.35 | 100.0 | 4.26E−02 | 1.13 | 2.2 |
| hsa-asg-8882 | 6.8 | 0.12 | 100.0 | 4.30E−02 | 1.07 | 2.1 |
| hsa-asg-4088 | 4.5 | 0.50 | 0.0 | 3.17E−02 | 1.00 | 2.0 |
| hsa-asg-12086 | 5.1 | 0.26 | 28.6 | 4.21E−02 | 0.96 | 1.9 |
| hsa-asg-8600 | 5.2 | 0.36 | 0.0 | 9.60E−03 | 0.95 | 1.9 |
| hsa-asg-8700 | 5.2 | 0.32 | 0.0 | 1.15E−02 | 0.94 | 1.9 |
| hsa-asg-8693 | 5.4 | 0.34 | 0.0 | 2.82E−02 | 0.94 | 1.9 |
| hsa-asg-9130 | 7.2 | 0.16 | 100.0 | 4.04E−02 | 0.88 | 1.8 |
| hsa-asg-12880 | 7.9 | 0.14 | 71.4 | 2.97E−02 | 0.79 | 1.7 |
| hsa-cand660 | 2.8 | 0.35 | 0.0 | 2.65E−02 | 0.79 | 1.7 |
| hsa-asg-7252 | 5.8 | 0.26 | 71.4 | 2.28E−02 | 0.75 | 1.7 |
| hsa-asg-10881 | 5.8 | 0.35 | 57.1 | 3.40E−02 | 0.68 | 1.6 |
| hsa-asg-3266 | 6.7 | 0.34 | 100.0 | 3.39E−02 | 0.68 | 1.6 |
| hsa-asg-11906 | 5.1 | 0.27 | 0.0 | 2.28E−02 | 0.64 | 1.6 |
| hsa-asg-10815 | 5.9 | 0.30 | 14.3 | 4.31E−02 | 0.60 | 1.5 |
| hsa-asg-2388 | 4.7 | 0.28 | 0.0 | 3.94E−02 | 0.58 | 1.5 |
| hsa-cand913 | 12.6 | 0.14 | 100.0 | 3.47E−03 | 0.53 | 1.4 |
| hsa-cand526 | 4.7 | 0.16 | 0.0 | 1.98E−02 | 0.51 | 1.4 |
| hsa-asg-4217 | 6.4 | 0.26 | 85.7 | 4.58E−02 | 0.51 | 1.4 |
| hsa-asg-12775 | 7.4 | 0.25 | 100.0 | 4.70E−02 | 0.48 | 1.4 |
| hsa-asg-13294 | 6.3 | 0.14 | 85.7 | 1.38E−02 | 0.39 | 1.3 |
| hsa-asg-1913 | 5.6 | 0.12 | 14.3 | 2.67E−02 | 0.25 | 1.2 |
| hsa-asg-2826 | 6.7 | 0.09 | 100.0 | 1.67E−02 | −0.24 | 1.2 |
| hsa-asg-14025 | 6.6 | 0.16 | 85.7 | 4.06E−02 | −0.30 | 1.2 |
| hsa-asg-6951 | 7.4 | 0.12 | 100.0 | 6.69E−03 | −0.42 | 1.3 |
| hsa-cand950 | 6.6 | 0.13 | 100.0 | 4.46E−02 | −0.42 | 1.3 |
| hsa-asg-5032 | 9.4 | 0.19 | 100.0 | 3.29E−02 | −0.46 | 1.4 |
| hsa-asg-8672 | 4.0 | 0.17 | 14.3 | 4.29E−02 | −0.46 | 1.4 |
| hsa-asg-7565 | 5.5 | 0.15 | 28.6 | 3.18E−02 | −0.53 | 1.4 |
| hsa-asg-1153 | 7.2 | 0.16 | 100.0 | 2.74E−03 | −0.54 | 1.5 |
| hsa-asg-7569 | 5.3 | 0.28 | 14.3 | 3.89E−02 | −0.54 | 1.5 |
| hsa-asg-6638 | 5.6 | 0.24 | 85.7 | 2.28E−02 | −0.55 | 1.5 |
| hsa-cand109 | 7.2 | 0.10 | 100.0 | 1.72E−02 | −0.57 | 1.5 |
| hsa-asg-1631 | 5.4 | 0.30 | 42.9 | 3.39E−02 | −0.59 | 1.5 |
| hsa-asg-13143 | 13.2 | 0.31 | 100.0 | 3.78E−02 | −0.59 | 1.5 |
| hsa-asg-4114 | 5.4 | 0.29 | 42.9 | 2.80E−02 | −0.59 | 1.5 |
| hsa-cand407 | 5.4 | 0.23 | 14.3 | 3.33E−02 | −0.59 | 1.5 |
| hsa-asg-7869 | 6.2 | 0.29 | 100.0 | 4.30E−02 | −0.60 | 1.5 |
| hsa-asg-795 | 5.8 | 0.26 | 57.1 | 4.91E−02 | −0.60 | 1.5 |
| hsa-asg-826 | 8.4 | 0.22 | 100.0 | 3.26E−02 | −0.61 | 1.5 |
| hsa-asg-948 | 5.9 | 0.28 | 57.1 | 2.89E−02 | −0.62 | 1.5 |
| hsa-asg-1236 | 6.0 | 0.13 | 42.9 | 1.21E−02 | −0.62 | 1.5 |
| hsa-cand458 | 5.7 | 0.29 | 71.4 | 4.19E−02 | −0.63 | 1.5 |
| hsa-asg-10619 | 5.9 | 0.29 | 85.7 | 3.24E−02 | −0.64 | 1.6 |
| hsa-cand583 | 5.9 | 0.22 | 28.6 | 2.26E−02 | −0.65 | 1.6 |
| hsa-asg-58 | 5.0 | 0.27 | 14.3 | 1.26E−02 | −0.67 | 1.6 |
| hsa-asg-9815 | 6.4 | 0.24 | 28.6 | 7.96E−03 | −0.67 | 1.6 |
| hsa-asg-2615 | 9.3 | 0.26 | 100.0 | 2.03E−02 | −0.69 | 1.6 |
| hsa-asg-1391 | 7.2 | 0.28 | 100.0 | 4.98E−02 | −0.70 | 1.6 |
| hsa-asg-4433 | 5.1 | 0.27 | 28.6 | 9.87E−03 | −0.70 | 1.6 |
| hsa-asg-1545 | 5.8 | 0.18 | 28.6 | 3.69E−03 | −0.71 | 1.6 |
| hsa-asg-10575 | 7.6 | 0.21 | 100.0 | 4.09E−02 | −0.72 | 1.6 |
| hsa-asg-2134 | 4.8 | 0.27 | 14.3 | 2.65E−02 | −0.72 | 1.7 |
| hsa-asg-1599 | 5.1 | 0.27 | 14.3 | 1.23E−02 | −0.73 | 1.7 |
| hsa-asg-555 | 7.2 | 0.34 | 100.0 | 3.98E−02 | −0.73 | 1.7 |
| hsa-asg-1941 | 4.8 | 0.22 | 14.3 | 3.41E−02 | −0.73 | 1.7 |
| hsa-asg-2843 | 5.2 | 0.22 | 28.6 | 6.63E−03 | −0.74 | 1.7 |
| hsa-asg-11867 | 5.0 | 0.23 | 14.3 | 4.34E−03 | −0.74 | 1.7 |
| hsa-asg-9739 | 5.5 | 0.29 | 100.0 | 1.26E−02 | −0.74 | 1.7 |
| hsa-asg-11329 | 5.2 | 0.23 | 14.3 | 3.43E−02 | −0.76 | 1.7 |
| hsa-asg-4196 | 6.3 | 0.23 | 71.4 | 5.35E−03 | −0.77 | 1.7 |
| hsa-asg-9597 | 5.1 | 0.45 | 28.6 | 4.84E−02 | −0.79 | 1.7 |
| hsa-asg-2041 | 5.5 | 0.30 | 14.3 | 8.94E−03 | −0.80 | 1.7 |
| hsa-asg-10914 | 4.8 | 0.23 | 28.6 | 8.01E−03 | −0.80 | 1.7 |
| hsa-asg-8598 | 6.0 | 0.31 | 57.1 | 1.24E−02 | −0.80 | 1.7 |
| hsa-asg-4587 | 5.6 | 0.19 | 14.3 | 6.47E−04 | −0.81 | 1.8 |
| hsa-asg-7643 | 8.0 | 0.43 | 85.7 | 4.56E−02 | −0.81 | 1.8 |
| hsa-asg-2693 | 6.3 | 0.34 | 85.7 | 1.64E−02 | −0.82 | 1.8 |
| hsa-asg-6651 | 6.2 | 0.24 | 100.0 | 2.90E−03 | −0.83 | 1.8 |
| hsa-asg-8675 | 6.7 | 0.33 | 85.7 | 2.63E−02 | −0.83 | 1.8 |
| hsa-asg-5576 | 6.1 | 0.49 | 57.1 | 4.83E−02 | −0.86 | 1.8 |
| hsa-asg-8477 | 7.6 | 0.31 | 100.0 | 2.03E−02 | −0.87 | 1.8 |
| hsa-asg-6838 | 6.1 | 0.16 | 0.0 | 2.47E−04 | −0.87 | 1.8 |
| hsa-asg-2989 | 4.9 | 0.40 | 14.3 | 2.10E−02 | −0.87 | 1.8 |
| hsa-asg-10796 | 6.0 | 0.21 | 28.6 | 6.59E−03 | −0.89 | 1.9 |
| hsa-asg-6005 | 7.1 | 0.33 | 100.0 | 3.61E−02 | −0.89 | 1.9 |
| hsa-asg-9562 | 5.4 | 0.47 | 42.9 | 3.95E−02 | −0.90 | 1.9 |
| hsa-asg-12049 | 7.3 | 0.28 | 100.0 | 1.85E−02 | −0.91 | 1.9 |
| hsa-asg-1362 | 4.6 | 0.44 | 14.3 | 2.93E−02 | −0.91 | 1.9 |
| hsa-asg-9004 | 8.0 | 0.30 | 100.0 | 9.65E−03 | −0.91 | 1.9 |
| hsa-asg-593 | 4.5 | 0.28 | 28.6 | 3.57E−03 | −0.91 | 1.9 |
| hsa-asg-11181 | 6.0 | 0.42 | 14.3 | 4.20E−02 | −0.92 | 1.9 |
| hsa-asg-6634 | 4.8 | 0.44 | 0.0 | 4.70E−02 | −0.92 | 1.9 |
| hsa-asg-3340 | 6.1 | 0.39 | 28.6 | 3.95E−02 | −0.93 | 1.9 |
| hsa-asg-10506 | 6.1 | 0.17 | 57.1 | 7.50E−03 | −0.94 | 1.9 |
| hsa-asg-11380 | 3.1 | 0.34 | 0.0 | 4.85E−02 | −0.95 | 1.9 |
| hsa-cand902 | 6.1 | 0.33 | 28.6 | 3.52E−02 | −0.95 | 1.9 |
| hsa-asg-12460 | 7.8 | 0.42 | 100.0 | 1.85E−02 | −0.96 | 1.9 |
| hsa-asg-8271 | 6.4 | 0.31 | 71.4 | 5.17E−03 | −0.98 | 2.0 |
| hsa-asg-14186 | 5.0 | 0.28 | 28.6 | 2.20E−02 | −1.00 | 2.0 |
| hsa-asg-10197 | 7.1 | 0.48 | 100.0 | 3.64E−02 | −1.01 | 2.0 |
| hsa-asg-4599 | 5.8 | 0.20 | 57.1 | 1.81E−02 | −1.02 | 2.0 |
| hsa-asg-3231 | 11.4 | 0.27 | 100.0 | 5.35E−03 | −1.02 | 2.0 |
| hsa-asg-12996 | 6.8 | 0.29 | 100.0 | 3.58E−03 | −1.03 | 2.0 |
| hsa-asg-10041 | 5.1 | 0.40 | 57.1 | 1.80E−02 | −1.03 | 2.0 |
| hsa-asg-4515 | 5.2 | 0.41 | 14.3 | 1.87E−02 | −1.03 | 2.0 |
| hsa-asg-7471 | 6.0 | 0.21 | 71.4 | 2.76E−04 | −1.05 | 2.1 |
| hsa-asg-14189 | 12.0 | 0.29 | 100.0 | 2.02E−03 | −1.05 | 2.1 |
| hsa-asg-9530 | 12.4 | 0.22 | 100.0 | 6.67E−03 | −1.06 | 2.1 |
| hsa-asg-2046 | 4.8 | 0.34 | 0.0 | 1.69E−02 | −1.07 | 2.1 |
| hsa-asg-5467 | 5.4 | 0.51 | 85.7 | 3.97E−02 | −1.08 | 2.1 |
| hsa-asg-11096 | 6.0 | 0.31 | 14.3 | 1.81E−02 | −1.09 | 2.1 |
| hsa-miR246 | 5.7 | 0.46 | 71.4 | 2.27E−02 | −1.10 | 2.1 |
| hsa-asg-1261 | 5.6 | 0.27 | 14.3 | 1.49E−02 | −1.11 | 2.2 |
| hsa-asg-10183 | 5.2 | 0.30 | 28.6 | 7.50E−03 | −1.11 | 2.2 |
| hsa-asg-9729 | 6.7 | 0.21 | 100.0 | 4.49E−04 | −1.11 | 2.2 |
| hsa-cand588 | 6.7 | 0.45 | 85.7 | 1.12E−02 | −1.14 | 2.2 |
| hsa-asg-3509 | 6.0 | 0.55 | 42.9 | 4.26E−02 | −1.14 | 2.2 |
| hsa-asg-6949 | 6.0 | 0.30 | 28.6 | 3.22E−03 | −1.14 | 2.2 |
| hsa-asg-2353 | 4.7 | 0.42 | 14.3 | 1.24E−02 | −1.14 | 2.2 |
| hsa-miR-594 | 8.4 | 0.65 | 85.7 | 4.75E−02 | −1.15 | 2.2 |
| hsa-asg-6761 | 5.1 | 0.33 | 71.4 | 1.15E−02 | −1.15 | 2.2 |
| hsa-asg-11373 | 7.9 | 0.49 | 71.4 | 1.69E−02 | −1.16 | 2.2 |
| hsa-cand190 | 5.0 | 0.33 | 14.3 | 2.75E−03 | −1.16 | 2.2 |
| hsa-asg-9403 | 8.6 | 0.42 | 100.0 | 1.69E−02 | −1.16 | 2.2 |
| hsa-asg-7275 | 5.3 | 0.33 | 71.4 | 2.46E−02 | −1.16 | 2.2 |
| hsa-asg-6880 | 5.9 | 0.37 | 0.0 | 3.68E−02 | −1.17 | 2.2 |
| hsa-asg-11893 | 7.9 | 0.25 | 100.0 | 8.95E−04 | −1.18 | 2.3 |
| hsa-asg-271 | 4.5 | 0.25 | 14.3 | 4.07E−03 | −1.19 | 2.3 |
| hsa-asg-8917 | 7.5 | 0.56 | 85.7 | 3.76E−02 | −1.19 | 2.3 |
| hsa-asg-2273 | 5.1 | 0.68 | 28.6 | 4.91E−02 | −1.20 | 2.3 |
| hsa-asg-11310 | 6.3 | 0.40 | 100.0 | 5.69E−03 | −1.20 | 2.3 |
| hsa-asg-4924 | 5.4 | 0.37 | 42.9 | 3.25E−03 | −1.22 | 2.3 |
| hsa-asg-2750 | 11.5 | 0.27 | 100.0 | 3.36E−02 | −1.22 | 2.3 |
| hsa-asg-7009 | 6.2 | 0.49 | 28.6 | 3.82E−02 | −1.23 | 2.4 |
| hsa-asg-1305 | 5.8 | 0.53 | 57.1 | 1.94E−02 | −1.24 | 2.4 |
| hsa-asg-7688 | 6.4 | 0.25 | 85.7 | 8.22E−04 | −1.24 | 2.4 |
| hsa-asg-4469 | 7.2 | 0.26 | 100.0 | 7.37E−03 | −1.25 | 2.4 |
| hsa-miR257 | 9.2 | 0.59 | 100.0 | 3.10E−02 | −1.25 | 2.4 |
| hsa-asg-6457 | 5.0 | 0.50 | 0.0 | 1.67E−02 | −1.26 | 2.4 |
| hsa-asg-14197_st1 | 9.7 | 0.56 | 100.0 | 1.96E−02 | −1.27 | 2.4 |
| hsa-asg-12666 | 5.4 | 0.38 | 28.6 | 4.46E−03 | −1.28 | 2.4 |
| hsa-asg-6357 | 5.9 | 0.49 | 28.6 | 4.22E−02 | −1.28 | 2.4 |
| hsa-asg-2824 | 5.9 | 0.61 | 71.4 | 2.48E−02 | −1.29 | 2.4 |
| hsa-asg-12339 | 6.9 | 0.54 | 100.0 | 2.79E−02 | −1.29 | 2.4 |
| hsa-asg-12765 | 5.2 | 0.62 | 14.3 | 2.79E−02 | −1.29 | 2.5 |
| hsa-asg-7319 | 5.5 | 0.20 | 57.1 | 5.22E−04 | −1.30 | 2.5 |
| hsa-asg-3829 | 4.7 | 0.42 | 14.3 | 2.59E−02 | −1.34 | 2.5 |
| hsa-asg-3070 | 5.3 | 0.46 | 14.3 | 6.36E−03 | −1.39 | 2.6 |
| hsa-asg-2343 | 5.8 | 0.36 | 100.0 | 3.38E−02 | −1.39 | 2.6 |
| hsa-asg-8018 | 5.3 | 0.40 | 14.3 | 2.41E−03 | −1.41 | 2.7 |
| hsa-asg-1268 | 4.2 | 0.59 | 0.0 | 1.69E−02 | −1.41 | 2.7 |
| hsa-asg-13693 | 6.1 | 0.18 | 42.9 | 1.88E−05 | −1.41 | 2.7 |
| hsa-asg-7532 | 5.7 | 0.73 | 57.1 | 3.46E−02 | −1.42 | 2.7 |
| hsa-asg-925 | 7.2 | 0.63 | 100.0 | 3.20E−02 | −1.46 | 2.8 |
| hsa-asg-3712 | 6.8 | 0.60 | 85.7 | 4.08E−02 | −1.47 | 2.8 |
| hsa-asg-12346 | 7.2 | 0.50 | 14.3 | 5.61E−03 | −1.47 | 2.8 |
| hsa-asg-14233 | 9.4 | 0.42 | 100.0 | 4.31E−03 | −1.48 | 2.8 |
| hsa-asg-13976 | 5.9 | 0.27 | 14.3 | 1.52E−04 | −1.49 | 2.8 |
| hsa-asg-14150 | 7.0 | 0.61 | 14.3 | 1.26E−02 | −1.51 | 2.8 |
| hsa-asg-6717 | 7.0 | 0.48 | 71.4 | 3.83E−03 | −1.51 | 2.8 |
| hsa-asg-10981 | 5.3 | 0.61 | 42.9 | 1.53E−02 | −1.51 | 2.9 |
| hsa-asg-6247 | 9.8 | 0.32 | 100.0 | 1.06E−03 | −1.52 | 2.9 |
| hsa-asg-7782 | 6.8 | 0.76 | 71.4 | 3.51E−02 | −1.53 | 2.9 |
| hsa-asg-2365 | 5.7 | 0.18 | 0.0 | 6.53E−05 | −1.57 | 3.0 |
| hsa-asg-11896 | 12.4 | 0.29 | 100.0 | 1.83E−02 | −1.58 | 3.0 |
| hsa-asg-3854 | 5.8 | 0.23 | 85.7 | 3.98E−05 | −1.60 | 3.0 |
| hsa-asg-9508 | 10.4 | 0.60 | 85.7 | 9.09E−03 | −1.60 | 3.0 |
| hsa-asg-13646 | 7.5 | 0.48 | 100.0 | 2.60E−03 | −1.64 | 3.1 |
| hsa-asg-12702 | 7.3 | 0.78 | 100.0 | 4.87E−02 | −1.65 | 3.1 |
| hsa-cand345 | 6.1 | 0.41 | 71.4 | 1.00E−03 | −1.65 | 3.1 |
| hsa-asg-6413 | 5.7 | 0.61 | 28.6 | 8.23E−03 | −1.68 | 3.2 |
| hsa-asg-9852 | 6.1 | 0.30 | 57.1 | 3.71E−03 | −1.69 | 3.2 |
| hsa-asg-10473 | 5.8 | 0.20 | 28.6 | 1.22E−05 | −1.69 | 3.2 |
| hsa-asg-12105 | 5.5 | 0.62 | 14.3 | 2.15E−02 | −1.70 | 3.3 |
| hsa-asg-2872 | 9.8 | 0.54 | 100.0 | 3.76E−03 | −1.72 | 3.3 |
| hsa-asg-8617 | 6.6 | 0.65 | 85.7 | 2.06E−02 | −1.72 | 3.3 |
| hsa-asg-797 | 5.3 | 0.14 | 14.3 | 4.69E−06 | −1.73 | 3.3 |
| hsa-asg-7149 | 6.3 | 0.65 | 71.4 | 8.91E−03 | −1.74 | 3.3 |
| hsa-asg-12973 | 6.1 | 0.32 | 85.7 | 1.38E−04 | −1.78 | 3.4 |
| hsa-asg-12902 | 6.8 | 0.58 | 100.0 | 1.15E−02 | −1.79 | 3.5 |
| hsa-asg-13097 | 5.1 | 1.00 | 14.3 | 4.47E−02 | −1.83 | 3.6 |
| hsa-asg-10861 | 5.9 | 0.40 | 14.3 | 5.59E−04 | −1.84 | 3.6 |
| hsa-asg-8682 | 6.6 | 0.96 | 85.7 | 3.84E−02 | −1.86 | 3.6 |
| hsa-asg-13205 | 7.0 | 0.81 | 85.7 | 1.81E−02 | −1.87 | 3.7 |
| hsa-cand768 | 11.4 | 0.53 | 100.0 | 3.34E−03 | −1.87 | 3.7 |
| hsa-asg-12759 | 5.1 | 0.83 | 57.1 | 2.37E−02 | −1.91 | 3.8 |
| hsa-asg-7080 | 4.7 | 0.38 | 14.3 | 3.60E−03 | −1.92 | 3.8 |
| hsa-asg-3360 | 6.9 | 0.42 | 100.0 | 1.04E−03 | −1.93 | 3.8 |
| hsa-asg-10149 | 7.6 | 0.48 | 85.7 | 1.18E−03 | −1.95 | 3.9 |
| hsa-asg-11612 | 5.8 | 0.66 | 28.6 | 5.76E−03 | −1.97 | 3.9 |
| hsa-asg-6138 | 5.3 | 0.47 | 28.6 | 9.12E−04 | −1.99 | 4.0 |
| hsa-asg-13244 | 6.8 | 0.51 | 100.0 | 2.26E−03 | −2.00 | 4.0 |
| hsa-cand965 | 7.3 | 0.66 | 28.6 | 5.20E−03 | −2.00 | 4.0 |
| hsa-asg-13230 | 6.8 | 0.17 | 100.0 | 7.47E−05 | −2.01 | 4.0 |
| hsa-asg-14245 | 12.1 | 0.52 | 100.0 | 2.83E−03 | −2.03 | 4.1 |
| hsa-asg-10263 | 5.6 | 0.47 | 57.1 | 4.23E−03 | −2.05 | 4.2 |
| hsa-asg-21 | 6.0 | 0.75 | 85.7 | 7.60E−03 | −2.06 | 4.2 |
| hsa-asg-12923 | 5.9 | 0.86 | 57.1 | 1.56E−02 | −2.09 | 4.3 |
| hsa-asg-4002 | 7.1 | 0.85 | 85.7 | 2.63E−02 | −2.09 | 4.3 |
| hsa-asg-9298 | 4.5 | 1.10 | 14.3 | 4.22E−02 | −2.10 | 4.3 |
| hsa-asg-13258 | 7.9 | 0.43 | 100.0 | 4.64E−04 | −2.12 | 4.3 |
| hsa-asg-13260 | 8.3 | 0.35 | 100.0 | 3.21E−04 | −2.13 | 4.4 |
| hsa-asg-14170 | 6.4 | 0.73 | 57.1 | 1.58E−02 | −2.15 | 4.4 |
| hsa-asg-242 | 5.7 | 1.17 | 42.9 | 4.82E−02 | −2.23 | 4.7 |
| hsa-asg-870 | 6.1 | 1.05 | 42.9 | 2.66E−02 | −2.27 | 4.8 |
| hsa-asg-4557 | 7.6 | 0.40 | 100.0 | 4.94E−04 | −2.28 | 4.8 |
| hsa-asg-5303 | 7.0 | 0.53 | 100.0 | 2.67E−03 | −2.28 | 4.9 |
| hsa-asg-8208 | 6.1 | 0.78 | 28.6 | 1.86E−02 | −2.31 | 4.9 |
| hsa-miR157 | 8.9 | 0.47 | 100.0 | 5.04E−04 | −2.32 | 5.0 |
| hsa-asg-818 | 5.4 | 1.17 | 28.6 | 4.36E−02 | −2.38 | 5.2 |
| hsa-asg-13248 | 9.2 | 0.58 | 100.0 | 7.91E−04 | −2.47 | 5.5 |
| hsa-asg-562 | 10.1 | 0.39 | 100.0 | 1.88E−04 | −2.58 | 6.0 |
| hsa-asg-13937 | 8.9 | 0.62 | 100.0 | 4.17E−03 | −2.60 | 6.0 |
| hsa-asg-13304 | 6.6 | 0.42 | 85.7 | 4.40E−04 | −2.66 | 6.3 |
| hsa-asg-13354 | 8.6 | 0.80 | 100.0 | 2.77E−03 | −2.67 | 6.4 |
| hsa-asg-5304 | 10.3 | 0.38 | 100.0 | 2.95E−05 | −2.69 | 6.4 |
| hsa-miR154 | 5.4 | 0.89 | 42.9 | 6.40E−03 | −2.71 | 6.5 |
| hsa-asg-10883 | 7.0 | 0.47 | 100.0 | 2.24E−04 | −2.71 | 6.5 |
| hsa-asg-10387 | 7.8 | 1.09 | 100.0 | 1.92E−02 | −2.74 | 6.7 |
| hsa-asg-10676 | 6.4 | 1.03 | 57.1 | 7.98E−03 | −2.81 | 7.0 |
| hsa-asg-7074 | 10.3 | 0.34 | 100.0 | 2.02E−03 | −2.84 | 7.2 |
| hsa-asg-13308 | 10.2 | 0.44 | 100.0 | 5.90E−05 | −2.89 | 7.4 |
| hsa-asg-10580 | 7.6 | 0.93 | 85.7 | 4.11E−03 | −2.91 | 7.5 |
| hsa-asg-14160 | 5.4 | 0.72 | 0.0 | 1.05E−03 | −2.96 | 7.8 |
| hsa-asg-4205 | 5.9 | 1.04 | 71.4 | 6.08E−03 | −3.00 | 8.0 |
| hsa-asg-10666 | 6.2 | 0.83 | 71.4 | 3.38E−03 | −3.01 | 8.0 |
| hsa-asg-13279 | 7.4 | 0.37 | 100.0 | 9.99E−06 | −3.17 | 9.0 |
| hsa-asg-14133 | 7.7 | 1.05 | 100.0 | 1.12E−02 | −3.21 | 9.2 |
| hsa-asg-13237 | 7.2 | 0.39 | 100.0 | 5.10E−06 | −3.62 | 12.3 |
| hsa-miR-100 | 12.2 | 0.36 | 100.0 | 4.68E−03 | −1.40 | 2.6 |
| hsa-miR-126 | 12.5 | 0.24 | 100.0 | 1.24E−04 | −1.93 | 3.8 |
| hsa-miR-140 | 7.7 | 0.70 | 100.0 | 2.14E−02 | −1.61 | 3.1 |
| hsa-miR-199a* | 12.8 | 0.19 | 100.0 | 3.79E−06 | −2.13 | 4.4 |
| hsa-miR-224 | 8.9 | 0.67 | 100.0 | 5.27E−03 | −2.03 | 4.1 |
| hsa-miR-29b | 10.9 | 0.36 | 100.0 | 7.70E−05 | −2.71 | 6.6 |
| hsa-miR-331 | 7.4 | 0.44 | 100.0 | 2.30E−04 | −2.50 | 5.7 |
| hsa-miR-365 | 4.9 | 0.31 | 0.0 | 1.73E−03 | −1.17 | 2.3 |
| hsa-miR-365 | 6.0 | 0.73 | 71.4 | 6.18E−02 | −1.28 | 2.4 |
| hsa-miR-376a | 4.6 | 0.60 | 0.0 | 5.33E−02 | −1.04 | 2.1 |
| hsa-miR-421 | 6.8 | 0.63 | 85.7 | 1.84E−01 | 0.71 | 1.6 |
| hsa-miR-503 | 7.1 | 0.60 | 71.4 | 5.61E−02 | 1.03 | 2.0 |
| hsa-miR-551b | 3.8 | 0.62 | 0.0 | 1.31E−01 | −0.85 | 1.8 |
| hsa-miR-592 | 3.1 | 0.30 | 0.0 | 1.05E−01 | 0.79 | 1.7 |

SD, standard deviation;
%, percentage of samples expressing miRNA above background levels;
Log2Diff, difference in VSN-transformed expression between LNposB and LNneg samples.

### Example 12

### miRNAs Differentially Expressed Between Melanoma Samples and LNneg and between LNpos and LNnet from Melanoma Patients

[0265] The inventors identified the common miRNAs that are differentially expressed between melanoma (MEL) samples and cancer-negative lymph nodes (LNneg) and between cancer-positive (LNpos) and cancer-negative (LNneg) lymph nodes from melanoma patients. For this analysis, differentially expressed miRNAs were identified as having a p-value <0.05 and fold-change >2. These miRNAs represent particularly useful biomarkers for monitoring melanoma metastasis to lymph nodes.

[0266] The inventors found 21 miRNAs to be differentially expressed between both MEL and LNneg samples (Table 10) and between LNpos1A and LNneg samples (Table 11). The miRNAs include hsa-miR-211, -203, -200b, -200c, -509, -513, -429, -187, -132, -605, -183, -508, -493-5p, 421-3p, -506, -584, -576, -495, -182, -514, and -382). Among these, four miRNAs (hsa-miR-203, -211, -509, and -513) had average expression levels between 20- and 160-fold lower in LNneg samples compared to either MEL (Table 10) or LNpos1A samples (Table 11). Among the predicted miRNAs, the inventors identified three (hsa-asg-5638-st2, -11338_st2, and -1296-st1) that were expressed at levels between 5- and 110-fold lower in LNneg samples compared to either MEL (Table 10) or LNpos1A samples (Table 11).

[0267] The inventors found that eight verified miRNAs (hsa-miR-211, -513, -509, -584, -132, -506, -508, and -514) were expressed at lower levels in LNneg samples compared to either MEL (Table 10) or LNposB (Table 12) samples. Among these, three miRNAs (hsa-miR-211, -513, and -509) had average expression levels between 20- and 85-fold lower in LNneg samples than in MEL (Table 10) or LNposB (Table 12) samples. Among the predicted miRNAs, eleven (hsa-asg-5638_st2, 5630_st2, -11338_st2, -9186_st1, -12271_st1, -10031_st1, -12381_st1, -2261_st1, -8633_st1, -4780-st1, and -11850_st1) were expressed at lower levels in LNneg samples compared to MEL (Table 10) or LNposB (Table 12) samples. Among these, four miRNAs (hsa-asg-5638_st2, -5630_st2, -11338_st2, and -9186 st1) had average expression levels between 5- and 100-fold lower in LNneg samples than in MEL (Table 10) or LNposB (Table 12) samples.

[0268] Together, the inventors found a total of eight verified miRNAs (hsa-miR-211, -513, -509, -584, -132, -506, -508, and -514) that were expressed at lower levels in LNneg samples compared to either MEL (Table 10), LNpos1A (Table 11), or LNposB (Table 12) samples. Among these, four miRNAs (hsa-miR-211, -513, -509, and -132) had average expression levels between 5- and 140-fold lower in LNneg samples than in MEL, LNpos1A, or LNposB samples. The inventors also identified two predicted miRNAs (hsa-asg5638_st2, and -11338_st2) that had average expression levels between 5- and 25-fold lower in LNneg samples than in either MEL, LNpos1A, or LNposB samples.

### Example 13

### qRT-PCR Verification of Differentially Expressed Micro-RNAs in Melanoma Tissues and Lymph Nodes from Melanoma Patients

[0269] The inventors also evaluated the differential expression of 13 selected miRNAs in MEL, LNpos, and LNneg frozen biopsy samples (Table 8, Table 9) by qRT-PCR. qRT-PCR reactions were performed using TaqMan® MicroRNA Assays (Applied Biosystems; Foster City, Calif., USA) specific for thirteen of the most differentially expressed miRNAs between LNposA/LNposB and LNneg samples and/or between MEL and LNneg samples (hsa-miR-205, -203, -211, -509, -200c, -506, -508, -200b, -514, -584, -429, -592, and -375). Assays were performed according to the manufacturer's instructions with 15 ng of input total RNA from one of 12 samples (MEL1, MEL 3, LNneg1-7, LNpos1A, LNpos2B, LNpos3B) (Table 8, Table 9) and were incubated in a 7900HT Fast Real-Time PCR system (Applied Biosystems, Foster City, Calif., USA). Initial data analysis was done using a 7500 Fast System SDS V2.3 software (Applied Biosystems). miR-16, whose expression level did not change between the different samples, was used for normalization. Results of qRT-PCR expression analysis for the thirteen miRNAs were compared with those obtained from microarray expression analysis (FIGS. 7-9).

[0270] qRT-PCR quantification confirmed the differential expression of ten miRNAs (hsa-miR-205, -203, -211, -200c, -508, -509, -584, -514, -200b, and -506) between MEL and LNneg samples (FIGS. 7A-7C). These results are consistent with the results obtained after array analysis (FIGS. 7A-7C).

[0271] Upon qRT-PCR analysis of the thirteen miRNAs in LNpos1A and LNneg samples, twelve were found to be expressed at significantly lower levels in the LNneg samples and one (hsa-miR-205) was not. These results correspond to those observed with microarray quantification (FIGS. 8A-8C).

[0272] Upon qRT-PCR analysis of the thirteen miRNAs in LNposB and LNneg samples, six (hsa-miR-211, -509, -506, -508, -514, and -584) were found to be expressed at significantly lower levels in the LNneg samples (FIGS. 9A-9C). As observed for the LNpos1A and LNneg samples, miR-205 was not found to be expressed at significantly different levels between LNposB and LNneg samples. As observed with microarray analysis, miR-429, -592, and -375 were not expressed at significantly different levels in LNposB and LNneg samples when quantified by qRT-PCR. This is in contrast to what was observed for these miRNAs in the LNposA and LNneg samples. In addition, three miRNAs, miR-203, -200b, and -200c, were not found differentially expressed between LNposB and LNneg samples, although these miRNAs were found differentially expressed between LNposA and LNneg samples (FIGS. 8A-8C and FIGS. 9A-9C). These observations suggest that qRT-PCR quantification of miR-200c, -203, -200b and -375 is a useful assay for distinguishing LNposA group lymph nodes from LNposB group lymph nodes.

[0273] These data demonstrate that both qRT-PCR and microarray analysis are effective methods for quantifying miRNA expression when evaluating metastasis of melanoma to lymph nodes.

### Example 14

### MicroRNAs Differentially Expressed between Melanoma Samples and LNpos from Melanoma Patients

[0274] Cancer cells present in lymph nodes are considered to be cells arising from a primary tumor, which have metastasized to that node. In the case of melanoma, a positive lymph node is defined by the AJCC as one containing an aggregate of melanoma cells 2 mm or greater in size. It is expected that miRNA expression in a primary melanoma tumor and in metastatic inguinal lymph nodes share similarities. However, miRNA expression differences may also exist as the consequence of genetic alterations linked to the cancer cells' ability to metastasize. The differences in miRNA expression between the primary melanoma and the metastatic melanoma cells in lymph nodes represent clinically significant surrogate markers for the propensity of a primary lesion to metastasize. Such differentially expressed miRNAs also represent targets for replacement therapy. To identify any such differences, the inventors compared miRNA expression between three primary melanoma tumors (MEL) and cancer-positive lymph nodes (LNposA, LNposB), using frozen biopsy specimens (Table 8, Table 9).

[0275] The inventors identified 8 miRNAs (2 verified, 6 predicted) that were expressed at significantly lower levels in the LNpos1A sample than in the MEL samples (p-value<0.05) with at least a 2-fold-change in expression level (log 2Diff (MEL vs LNpos1A)≧1) (Table 13). Interestingly, hsa-miR-205 was not found significantly differentially expressed by array analysis despite a differential expression of at least 182-fold between MEL samples and the LNpos1A sample. This result may be due to the presence of only one sample in the LNposA group and the result of a lack of power of the analysis. qRT-PCR analysis, however, confirmed the differential expression between the LNpos1A sample and the MEL samples (FIG. 8A-8C). In addition, a total of 14 miRNAs (5 verified and 9 predicted) were identified that were expressed at lower levels in the MEL samples compared to the LNpos1A sample (Table 13). Among these, four miRNAs (hsa-miR-215, -592, -518c*, and -522) had average levels of expression between 5- and 25-fold lower in the MEL samples compared to the LNpos1A sample (Table 13).

[0276] The inventors also identified 55 miRNAs (29 verified, 26 predicted) with significant differential expression between melanoma samples and the LNposB group of cancer-positive lymph nodes (p-value<0.05 and log 2Diff (MEL vs LNposB)≧1) (Table 14). Among the verified miRNAs, two (hsa-miR-205 and -203) had average expression levels at least 500-fold higher in MEL samples than in LNposB samples and five miRNAs (hsa-miR-31, -200c, -218, -223, and -493-5p) had average expression levels between 5- and 60-fold higher in MEL than in LNposB samples (Table 14). Among the 26 predicted miRNAs, only one (hsa-asg-14160-st1) was expressed at least 10-fold higher in MEL samples than in LNposB samples (Table 14). No verified miRNA was found expressed at a lower level in MEL samples compared to LNposB samples. Only three predicted miRNAs had average expression levels lower by 2-3-fold in MEL than in LNposB samples (Table 14).

TABLE 13
MicroRNAs Differentially Expressed Between Cancer-Positive Lymph Node
Group A Sample (LNpos1A) and Melanoma Samples (MEL).

| | | MEL | | | | | | | MEL vs LNpos1A | | |
|---|---|---|---|---|---|---|---|---|---|---|---|
| MicroRNA | Probe ID | 1 | 3 | Mean | SD | % | LNpos1A | LNpos1A % | ttest | Log2Diff | FC |
| hsa-miR-181a* | hsa-miR-213_st1 | 6.17 | 6.25 | 6.21 | 0.05 | 50 | 3.58 | 0 | 1.58E−02 | 2.63 | 6.2 |
| hsa-asg-9117 | hsa-asg-9117_st1 | 6.98 | 6.99 | 6.98 | 0.01 | 100 | 5.35 | 0 | 5.15E−03 | 1.64 | 3.1 |
| hsa-miR-22 | hsa-miR-22_st1 | 11.70 | 11.79 | 11.75 | 0.06 | 100 | 10.32 | 100 | 3.35E−02 | 1.43 | 2.7 |
| hsa-asg-13881 | hsa-asg-13881_st1 | 5.86 | 5.74 | 5.80 | 0.09 | 0 | 4.41 | 0 | 4.87E−02 | 1.39 | 2.6 |
| hsa-asg-14175 | hsa-asg-14175_st1 | 7.58 | 7.53 | 7.55 | 0.03 | 100 | 6.21 | 100 | 1.94E−02 | 1.34 | 2.5 |
| hsa-asg-12885 | hsa-asg-12885_st1 | 6.13 | 6.11 | 6.12 | 0.02 | 50 | 4.86 | 0 | 1.06E−02 | 1.26 | 2.4 |
| hsa-asg-9128 | hsa-asg-9128_st1 | 5.11 | 5.05 | 5.08 | 0.04 | 0 | 4.02 | 0 | 3.23E−02 | 1.06 | 2.1 |
| hsa-asg-11458 | hsa-asg-11458_st2 | 6.52 | 6.52 | 6.52 | 0.00 | 100 | 5.51 | 0 | 2.72E−04 | 1.01 | 2.0 |
| hsa-asg-3846 | hsa-asg-3846_st2 | 3.89 | 3.83 | 3.86 | 0.04 | 0 | 2.91 | 0 | 3.40E−02 | 0.95 | 1.9 |
| hsa-asg-954 | hsa-asg-954_st1 | 9.97 | 9.90 | 9.93 | 0.05 | 100 | 9.05 | 100 | 4.20E−02 | 0.88 | 1.8 |
| hsa-miR-424 | hsa-miR-424_st1 | 6.29 | 6.36 | 6.32 | 0.05 | 100 | 5.44 | 0 | 4.40E−02 | 0.88 | 1.8 |
| hsa-asg-917 | hsa-asg-917_st2 | 6.00 | 5.98 | 5.99 | 0.02 | 50 | 5.20 | 0 | 1.92E−02 | 0.79 | 1.7 |
| hsa-asg-6020 | hsa-asg-6020_st1 | 6.77 | 6.76 | 6.77 | 0.00 | 100 | 6.00 | 0 | 3.06E−03 | 0.76 | 1.7 |
| hsa-asg-11196 | hsa-asg-11196_st1 | 3.62 | 3.65 | 3.63 | 0.02 | 0 | 2.91 | 0 | 2.25E−02 | 0.72 | 1.6 |
| hsa-asg-8700 | hsa-asg-8700_st1 | 5.57 | 5.51 | 5.54 | 0.04 | 0 | 4.86 | 0 | 4.72E−02 | 0.67 | 1.6 |
| hsa-asg-12320 | hsa-asg-12320_st2 | 5.65 | 5.64 | 5.65 | 0.01 | 50 | 5.01 | 0 | 8.46E−03 | 0.64 | 1.6 |
| hsa-cand720 | hsa-cand720_st1 | 5.98 | 6.01 | 6.00 | 0.02 | 0 | 5.38 | 0 | 2.57E−02 | 0.62 | 1.5 |
| hsa-asg-593 | hsa-asg-593_st2 | 4.59 | 4.61 | 4.60 | 0.02 | 0 | 4.02 | 0 | 2.28E−02 | 0.58 | 1.5 |
| hsa-asg-11958 | hsa-asg-11958_st1 | 8.16 | 8.16 | 8.16 | 0.01 | 100 | 7.60 | 100 | 8.64E−03 | 0.56 | 1.5 |
| hsa-asg-733 | hsa-asg-733_st1 | 6.38 | 6.41 | 6.39 | 0.02 | 100 | 5.88 | 100 | 3.58E−02 | 0.52 | 1.4 |
| hsa-asg-4486 | hsa-asg-4486_st2 | 6.38 | 6.38 | 6.38 | 0.00 | 100 | 5.88 | 100 | 9.31E−04 | 0.50 | 1.4 |
| hsa-asg-9521 | hsa-asg-9521_st2 | 5.47 | 5.49 | 5.48 | 0.01 | 100 | 5.03 | 0 | 2.35E−02 | 0.45 | 1.4 |
| hsa-asg-9185 | hsa-asg-9185_st2 | 8.32 | 8.33 | 8.32 | 0.01 | 100 | 7.89 | 100 | 1.75E−02 | 0.44 | 1.4 |
| hsa-asg-8305 | hsa-asg-8305_st2 | 6.82 | 6.82 | 6.82 | 0.00 | 100 | 6.40 | 100 | 4.72E−03 | 0.42 | 1.3 |
| hsa-asg-8815 | hsa-asg-8815_st2 | 6.03 | 6.00 | 6.01 | 0.02 | 50 | 5.59 | 0 | 3.56E−02 | 0.42 | 1.3 |
| hsa-asg-2989 | hsa-asg-2989_st1 | 5.07 | 5.05 | 5.06 | 0.01 | 0 | 4.65 | 0 | 2.82E−02 | 0.41 | 1.3 |
| hsa-asg-13924 | hsa-asg-13924_st1 | 6.05 | 6.04 | 6.05 | 0.00 | 50 | 5.66 | 0 | 6.25E−03 | 0.39 | 1.3 |
| hsa-asg-8600 | hsa-asg-8600_st2 | 5.62 | 5.61 | 5.62 | 0.01 | 50 | 5.30 | 0 | 1.76E−02 | 0.32 | 1.2 |
| hsa-asg-3550 | hsa-asg-3550_st2 | 5.96 | 5.98 | 5.97 | 0.01 | 50 | 5.76 | 0 | 4.67E−02 | 0.21 | 1.2 |
| hsa-asg-9480 | hsa-asg-9480_st1 | 7.74 | 7.74 | 7.74 | 0.00 | 100 | 7.55 | 100 | 7.53E−03 | 0.19 | 1.1 |
| hsa-asg-11623 | hsa-asg-11623_st1 | 9.21 | 9.21 | 9.21 | 0.00 | 50 | 9.11 | 0 | 8.71E−05 | 0.10 | 1.1 |
| hsa-let-7b | hsa-let-7b_st2 | 13.69 | 13.69 | 13.69 | 0.00 | 100 | 13.63 | 100 | 5.54E−03 | 0.06 | 1.0 |
| hsa-asg-12460 | hsa-asg-12460_st2 | 6.63 | 6.63 | 6.63 | 0.00 | 100 | 6.68 | 100 | 1.60E−02 | −0.05 | 1.0 |
| hsa-miR-98 | hsa-miR-98_st1 | 11.73 | 11.73 | 11.73 | 0.00 | 100 | 11.80 | 100 | 4.94E−03 | −0.07 | 1.1 |
| hsa-asg-11293 | hsa-asg-11293_st1 | 6.38 | 6.38 | 6.38 | 0.00 | 100 | 6.46 | 100 | 5.32E−03 | −0.09 | 1.1 |
| hsa-asg-11626 | hsa-asg-11626_st1 | 6.83 | 6.83 | 6.83 | 0.00 | 100 | 6.95 | 100 | 1.66E−02 | −0.12 | 1.1 |
| hsa-asg-3352 | hsa-asg-3352_st1 | 5.81 | 5.81 | 5.81 | 0.01 | 50 | 5.94 | 100 | 3.13E−02 | −0.13 | 1.1 |
| hsa-asg-4023 | hsa-asg-4023_st2 | 5.91 | 5.92 | 5.92 | 0.00 | 0 | 6.06 | 0 | 2.19E−02 | −0.15 | 1.1 |
| hsa-let-7a | hsa-let-7a_st2 | 14.19 | 14.18 | 14.18 | 0.00 | 100 | 14.34 | 100 | 2.00E−02 | −0.15 | 1.1 |
| hsa-asg-13306 | hsa-asg-13306_st2 | 8.90 | 8.90 | 8.90 | 0.01 | 100 | 9.06 | 100 | 2.64E−02 | −0.16 | 1.1 |
| hsa-asg-974 | hsa-asg-974_st2 | 6.60 | 6.60 | 6.60 | 0.00 | 100 | 6.77 | 100 | 3.83E−03 | −0.16 | 1.1 |
| hsa-asg-7701 | hsa-asg-7701_st2 | 5.60 | 5.59 | 5.59 | 0.01 | 0 | 5.76 | 0 | 3.48E−02 | −0.17 | 1.1 |
| hsa-asg-3588 | hsa-asg-3588_st1 | 8.22 | 8.22 | 8.22 | 0.01 | 100 | 8.42 | 100 | 2.17E−02 | −0.20 | 1.1 |
| hsa-asg-2251 | hsa-asg-2251_st1 | 5.37 | 5.36 | 5.37 | 0.01 | 0 | 5.59 | 0 | 3.53E−02 | −0.23 | 1.2 |
| hsa-asg-11844 | hsa-asg-11844_st2 | 5.11 | 5.09 | 5.10 | 0.01 | 0 | 5.35 | 0 | 4.53E−02 | −0.24 | 1.2 |
| hsa-asg-3340 | hsa-asg-3340_st2 | 5.41 | 5.43 | 5.42 | 0.01 | 0 | 5.66 | 0 | 4.44E−02 | −0.24 | 1.2 |
| hsa-miR131 | hsa-miR131_st1 | 5.50 | 5.52 | 5.51 | 0.01 | 0 | 5.76 | 0 | 4.31E−02 | −0.25 | 1.2 |
| hsa-asg-10821 | hsa-asg-10821_st2 | 5.41 | 5.39 | 5.40 | 0.01 | 0 | 5.66 | 0 | 2.97E−02 | −0.26 | 1.2 |
| hsa-asg-8351 | hsa-asg-8351_st1 | 4.94 | 4.92 | 4.93 | 0.02 | 0 | 5.20 | 0 | 4.97E−02 | −0.27 | 1.2 |
| hsa-asg-12169 | hsa-asg-12169_st2 | 6.38 | 6.38 | 6.38 | 0.00 | 100 | 6.65 | 100 | 1.73E−03 | −0.27 | 1.2 |
| hsa-asg-2541 | hsa-asg-2541_st1 | 6.57 | 6.55 | 6.56 | 0.02 | 100 | 6.84 | 100 | 4.41E−02 | −0.28 | 1.2 |
| hsa-asg-9181 | hsa-asg-9181_st1 | 8.97 | 8.99 | 8.98 | 0.01 | 50 | 9.36 | 0 | 2.63E−02 | −0.37 | 1.3 |
| hsa-asg-10619 | hsa-asg-10619_st1 | 6.03 | 6.00 | 6.01 | 0.02 | 100 | 6.40 | 100 | 3.90E−02 | −0.38 | 1.3 |
| hsa-asg-2626 | hsa-asg-2626_st1 | 8.13 | 8.10 | 8.11 | 0.02 | 100 | 8.51 | 100 | 4.54E−02 | −0.40 | 1.3 |
| hsa-asg-8421 | hsa-asg-8421_st1 | 7.98 | 8.02 | 8.00 | 0.02 | 100 | 8.42 | 100 | 4.47E−02 | −0.42 | 1.3 |
| hsa-asg-507 | hsa-asg-507_st1 | 2.58 | 2.61 | 2.60 | 0.02 | 0 | 3.03 | 0 | 3.67E−02 | −0.43 | 1.3 |
| hsa-asg-10183 | hsa-asg-10183_st1 | 4.53 | 4.49 | 4.51 | 0.03 | 0 | 4.97 | 0 | 4.28E−02 | −0.46 | 1.4 |
| hsa-asg-2500 | hsa-asg-2500_st1 | 6.36 | 6.35 | 6.35 | 0.01 | 100 | 6.81 | 100 | 1.19E−02 | −0.46 | 1.4 |
| hsa-cand735 | hsa-cand735_st2 | 7.49 | 7.47 | 7.48 | 0.01 | 100 | 7.95 | 100 | 2.09E−02 | −0.47 | 1.4 |
| hsa-asg-14015 | hsa-asg-14015_st1 | 5.62 | 5.60 | 5.61 | 0.02 | 0 | 6.10 | 0 | 2.81E−02 | −0.49 | 1.4 |
| hsa-asg-4426 | hsa-asg-4426_st2 | 4.59 | 4.55 | 4.57 | 0.02 | 0 | 5.07 | 0 | 3.74E−02 | −0.50 | 1.4 |
| hsa-miR-519a | hsa-miR-519a_st1 | 5.54 | 5.52 | 5.53 | 0.01 | 0 | 6.04 | 100 | 1.26E−02 | −0.51 | 1.4 |
| hsa-asg-6437 | hsa-asg-6437_st1 | 6.78 | 6.74 | 6.76 | 0.03 | 100 | 7.34 | 100 | 4.22E−02 | −0.58 | 1.5 |
| hsa-asg-14066 | hsa-asg-14066_st2 | 6.81 | 6.80 | 6.81 | 0.00 | 100 | 7.41 | 100 | 3.44E−03 | −0.60 | 1.5 |
| hsa-asg-14038 | hsa-asg-14038_st1 | 6.44 | 6.45 | 6.44 | 0.01 | 0 | 7.05 | 0 | 1.49E−02 | −0.61 | 1.5 |
| hsa-asg-4148 | hsa-asg-4148_st1 | 2.58 | 2.61 | 2.60 | 0.02 | 0 | 3.24 | 0 | 2.45E−02 | −0.64 | 1.6 |
| hsa-asg-531 | hsa-asg-531_st1 | 2.58 | 2.61 | 2.60 | 0.02 | 0 | 3.24 | 0 | 2.45E−02 | −0.64 | 1.6 |
| hsa-asg-4502 | hsa-asg-4502_st1 | 7.20 | 7.24 | 7.22 | 0.03 | 100 | 7.87 | 100 | 3.74E−02 | −0.65 | 1.6 |
| hsa-asg-3808 | hsa-asg-3808_st1 | 7.10 | 7.09 | 7.09 | 0.01 | 0 | 7.77 | 100 | 1.36E−02 | −0.68 | 1.6 |
| hsa-cand711 | hsa-cand711_st1 | 9.10 | 9.13 | 9.11 | 0.02 | 50 | 9.79 | 100 | 2.48E−02 | −0.68 | 1.6 |
| hsa-asg-8917 | hsa-asg-8917_st2 | 5.84 | 5.91 | 5.87 | 0.05 | 0 | 6.63 | 0 | 4.89E−02 | −0.75 | 1.7 |
| hsa-asg-6948 | hsa-asg-6948_st2 | 7.69 | 7.66 | 7.67 | 0.02 | 100 | 8.46 | 100 | 1.72E−02 | −0.79 | 1.7 |
| hsa-asg-6149 | hsa-asg-6149_st2 | 6.94 | 6.90 | 6.92 | 0.02 | 0 | 7.73 | 100 | 2.19E−02 | −0.81 | 1.8 |
| hsa-miR198 | hsa-miR198_st1 | 4.90 | 4.87 | 4.88 | 0.02 | 0 | 5.70 | 0 | 1.70E−02 | −0.82 | 1.8 |
| hsa-asg-12775 | hsa-asg-12775_st1 | 6.60 | 6.65 | 6.63 | 0.04 | 100 | 7.45 | 100 | 3.53E−02 | −0.82 | 1.8 |
| hsa-asg-13135 | hsa-asg-13135_st1 | 5.34 | 5.32 | 5.33 | 0.01 | 0 | 6.19 | 100 | 9.87E−03 | −0.85 | 1.8 |
| hsa-asg-5304 | hsa-asg-5304_st1 | 9.09 | 9.11 | 9.10 | 0.01 | 100 | 9.96 | 100 | 1.03E−02 | −0.86 | 1.8 |
| hsa-asg-312 | hsa-asg-312_st2 | 5.65 | 5.67 | 5.66 | 0.01 | 100 | 6.53 | 100 | 1.19E−02 | −0.87 | 1.8 |
| hsa-asg-9526 | hsa-asg-9526_st2 | 4.94 | 4.87 | 4.91 | 0.05 | 0 | 5.78 | 0 | 4.47E−02 | −0.88 | 1.8 |
| hsa-asg-3138 | hsa-asg-3138_st2 | 4.59 | 4.55 | 4.57 | 0.02 | 0 | 5.48 | 0 | 2.04E−02 | −0.91 | 1.9 |
| hsa-asg-1399 | hsa-asg-1399_st1 | 4.80 | 4.87 | 4.83 | 0.05 | 0 | 5.80 | 0 | 4.09E−02 | −0.96 | 1.9 |
| hsa-asg-4599 | hsa-asg-4599_st1 | 5.07 | 5.05 | 5.06 | 0.01 | 0 | 6.03 | 0 | 1.19E−02 | −0.97 | 2.0 |
| hsa-asg-7510 | hsa-asg-7510_st1 | 8.62 | 8.63 | 8.62 | 0.00 | 100 | 9.60 | 100 | 3.59E−03 | −0.98 | 2.0 |
| hsa-asg-271 | hsa-asg-271_st1 | 3.71 | 3.74 | 3.73 | 0.02 | 0 | 4.73 | 0 | 1.59E−02 | −1.00 | 2.0 |
| hsa-asg-2824 | hsa-asg-2824_st2 | 4.85 | 4.87 | 4.86 | 0.02 | 0 | 5.86 | 0 | 1.22E−02 | −1.01 | 2.0 |
| hsa-asg-3941 | hsa-asg-3941_st2 | 5.96 | 5.89 | 5.93 | 0.05 | 0 | 7.00 | 100 | 3.33E−02 | −1.07 | 2.1 |
| hsa-asg-3341 | hsa-asg-3341_st1 | 4.75 | 4.72 | 4.73 | 0.02 | 0 | 5.81 | 100 | 1.49E−02 | −1.07 | 2.1 |
| hsa-asg-3832 | hsa-asg-3832_st1 | 4.59 | 4.61 | 4.60 | 0.02 | 0 | 5.71 | 0 | 1.18E−02 | −1.11 | 2.2 |
| hsa-asg-10752 | hsa-asg-10752_st1 | 5.15 | 5.09 | 5.12 | 0.04 | 0 | 6.38 | 100 | 2.64E−02 | −1.26 | 2.4 |
| hsa-asg-12376 | hsa-asg-12376_st2 | 5.30 | 5.43 | 5.37 | 0.09 | 0 | 6.87 | 100 | 4.51E−02 | −1.50 | 2.8 |
| hsa-asg-12246 | hsa-asg-12246_st2 | 4.80 | 4.89 | 4.85 | 0.07 | 0 | 6.53 | 100 | 3.12E−02 | −1.68 | 3.2 |
| hsa-asg-9577 | hsa-asg-9577_st1 | 5.41 | 5.27 | 5.34 | 0.10 | 0 | 7.09 | 100 | 4.34E−02 | −1.75 | 3.4 |
| hsa-asg-12105 | hsa-asg-12105_st2 | 4.34 | 4.23 | 4.29 | 0.08 | 0 | 6.14 | 0 | 3.31E−02 | −1.85 | 3.6 |
| hsa-miR-7 | hsa-miR-7_st1 | 8.41 | 8.58 | 8.50 | 0.12 | 100 | 10.60 | 100 | 4.35E−02 | −2.10 | 4.3 |
| hsa-miR-522 | hsa-miR-522_st2 | 3.89 | 3.65 | 3.77 | 0.17 | 0 | 6.53 | 100 | 4.85E−02 | −2.76 | 6.8 |
| hsa-miR-518c* | hsa-miR-518c-_st2 | 3.52 | 3.45 | 3.48 | 0.05 | 0 | 6.34 | 100 | 1.42E−02 | −2.86 | 7.2 |
| hsa-miR-592 | hsa-miR-592_st1 | 3.89 | 3.65 | 3.77 | 0.17 | 0 | 6.89 | 100 | 4.29E−02 | −3.12 | 8.7 |
| hsa-miR-215 | hsa-miR-215_st1 | 5.19 | 5.59 | 5.39 | 0.28 | 0 | 9.98 | 100 | 4.71E−02 | −4.59 | 24.0 |
| hsa-miR-592 | hsa-asg-4400_st1 | 4.53 | 4.61 | 4.57 | 0.06 | 0 | 6.79 | 100 | 2.03E−02 | −2.22 | 4.7 |

SD, standard deviation;
%, percentage of samples expressing miRNA above background levels;
Log2Diff, difference in VSN-transformed expression between LNpos1A and MEL samples.

TABLE 14
MicroRNAs Differentially Expressed Between Cancer-Positive Lymph Node Group B
Samples (LNpos2B, -3B, and -4B) and Melanoma Samples (MEL).

| | | MEL | | | | | LNpos | | | | | MEL vs LNposB | | |
|---|---|---|---|---|---|---|---|---|---|---|---|---|---|---|
| MicroRNA | Probe ID | 1 | 3 | Mean | SD | % | 2B | 3B | Mean | SD | % | ttest | Log2Diff | FC) |
| hsa-miR-205 | hsa-miR-205_st1 | 13.32 | 11.35 | 12.33 | 1.40 | 100 | 2.12 | 3.51 | 2.81 | 0.98 | 0 | 1.56E−02 | 9.52 | 734.2 |
| hsa-miR-203 | hsa-miR-203_st2 | 13.82 | 12.43 | 13.13 | 0.98 | 100 | 4.58 | 3.58 | 4.08 | 0.71 | 0 | 8.86E−03 | 9.04 | 527.7 |
| hsa-miR-31 | hsa-miR-31_st2 | 12.58 | 10.88 | 11.73 | 1.20 | 100 | 5.83 | 5.88 | 5.86 | 0.04 | 50 | 2.03E−02 | 5.87 | 58.5 |
| hsa-miR-200c | hsa-miR-200c_st1 | 12.67 | 10.60 | 11.64 | 1.47 | 100 | 6.68 | 5.41 | 6.05 | 0.90 | 50 | 4.42E−02 | 5.59 | 48.1 |
| hsa-miR-218 | hsa-miR-218_st2 | 8.60 | 9.75 | 9.17 | 0.82 | 100 | 5.83 | 5.93 | 5.88 | 0.07 | 50 | 2.97E−02 | 3.29 | 9.8 |
| hsa-miR-223 | hsa-miR-223_st1 | 12.01 | 11.48 | 11.75 | 0.37 | 100 | 9.03 | 9.24 | 9.14 | 0.15 | 100 | 1.18E−02 | 2.61 | 6.1 |
| hsa-miR-493-5p | hsa-miR-493-5p_st1 | 7.49 | 7.26 | 7.38 | 0.16 | 100 | 4.75 | 4.93 | 4.84 | 0.13 | 0 | 3.37E−03 | 2.53 | 5.8 |
| hsa-miR-22 | hsa-miR-22_st1 | 11.70 | 11.79 | 11.75 | 0.06 | 100 | 9.66 | 9.24 | 9.45 | 0.30 | 100 | 8.84E−03 | 2.30 | 4.9 |
| hsa-miR-425-5p | hsa-asg-14166_st2 | 10.59 | 10.91 | 10.75 | 0.23 | 100 | 8.77 | 8.96 | 8.86 | 0.13 | 100 | 9.75E−03 | 1.89 | 3.7 |
| hsa-miR-484 | hsa-miR-484_st2 | 7.82 | 8.42 | 8.12 | 0.43 | 100 | 6.47 | 6.02 | 6.24 | 0.32 | 0 | 3.75E−02 | 1.88 | 3.7 |
| hsa-miR-127 | hsa-miR-127_st1 | 7.63 | 7.11 | 7.37 | 0.36 | 100 | 5.35 | 5.72 | 5.53 | 0.26 | 0 | 2.85E−02 | 1.84 | 3.6 |
| hsa-miR-27a | hsa-miR-27a_st2 | 12.18 | 11.88 | 12.03 | 0.21 | 100 | 10.16 | 10.34 | 10.25 | 0.13 | 100 | 9.57E−03 | 1.78 | 3.4 |
| hsa-miR-199a* | hsa-miR-199a-_st1 | 12.59 | 12.36 | 12.48 | 0.17 | 100 | 10.51 | 10.89 | 10.70 | 0.27 | 100 | 1.56E−02 | 1.78 | 3.4 |
| hsa-miR-24 | hsa-miR-24_st1 | 13.74 | 13.62 | 13.68 | 0.08 | 100 | 11.97 | 11.89 | 11.93 | 0.05 | 100 | 1.50E−03 | 1.75 | 3.4 |
| hsa-miR-139 | hsa-miR-139_st2 | 8.68 | 8.59 | 8.63 | 0.06 | 100 | 7.15 | 6.63 | 6.89 | 0.37 | 100 | 2.25E−02 | 1.74 | 3.3 |
| hsa-miR-365 | hsa-miR-365_st1 | 6.34 | 6.81 | 6.58 | 0.33 | 100 | 4.64 | 5.08 | 4.86 | 0.31 | 0 | 3.38E−02 | 1.71 | 3.3 |
| hsa-miR-7 | hsa-miR-7_st1 | 8.41 | 8.58 | 8.50 | 0.12 | 100 | 6.70 | 6.94 | 6.82 | 0.17 | 100 | 7.55E−03 | 1.68 | 3.2 |
| hsa-miR-181a* | hsa-miR-213_st1 | 6.17 | 6.25 | 6.21 | 0.05 | 50 | 4.40 | 4.74 | 4.57 | 0.24 | 0 | 1.14E−02 | 1.64 | 3.1 |
| hsa-miR-565 | hsa-miR-565_st1 | 7.84 | 7.44 | 7.64 | 0.28 | 50 | 5.95 | 6.18 | 6.07 | 0.16 | 0 | 2.06E−02 | 1.57 | 3.0 |
| hsa-miR-652 | hsa-miR-652_st1 | 9.33 | 9.38 | 9.36 | 0.03 | 100 | 8.15 | 7.62 | 7.88 | 0.37 | 50 | 3.09E−02 | 1.48 | 2.8 |
| hsa-miR-107 | hsa-miR-107_st2 | 12.74 | 12.89 | 12.82 | 0.11 | 100 | 11.55 | 11.28 | 11.41 | 0.19 | 100 | 1.15E−02 | 1.40 | 2.6 |
| hsa-miR-103 | hsa-miR-103_st1 | 12.79 | 12.92 | 12.86 | 0.09 | 100 | 11.67 | 11.40 | 11.54 | 0.19 | 100 | 1.25E−02 | 1.32 | 2.5 |
| hsa-miR-93 | hsa-miR-93_st2 | 10.97 | 11.23 | 11.10 | 0.18 | 100 | 10.10 | 9.63 | 9.86 | 0.33 | 100 | 4.35E−02 | 1.24 | 2.4 |
| hsa-miR-324-5p | hsa-miR-324-5p_st1 | 8.42 | 8.83 | 8.62 | 0.29 | 100 | 7.47 | 7.32 | 7.39 | 0.10 | 100 | 2.93E−02 | 1.23 | 2.3 |
| hsa-miR-152 | hsa-miR-152_st1 | 11.10 | 11.39 | 11.24 | 0.20 | 100 | 10.07 | 9.97 | 10.02 | 0.07 | 100 | 1.48E−02 | 1.22 | 2.3 |
| hsa-miR-191 | hsa-miR-191_st2 | 13.16 | 13.38 | 13.27 | 0.15 | 100 | 12.13 | 11.97 | 12.05 | 0.11 | 100 | 1.17E−02 | 1.22 | 2.3 |
| hsa-miR-17-3p | hsa-miR-17-3p_st1 | 4.99 | 5.01 | 5.00 | 0.02 | 0 | 3.68 | 4.13 | 3.91 | 0.32 | 0 | 4.01E−02 | 1.09 | 2.1 |
| hsa-miR-128b | hsa-miR-128b_st1 | 10.77 | 10.64 | 10.71 | 0.09 | 100 | 9.53 | 9.86 | 9.70 | 0.23 | 100 | 2.93E−02 | 1.01 | 2.0 |
| hsa-miR-128a | hsa-miR-128a_st2 | 10.36 | 10.22 | 10.29 | 0.10 | 100 | 9.10 | 9.49 | 9.30 | 0.27 | 100 | 4.06E−02 | 0.99 | 2.0 |
| hsa-let-7b | hsa-let-7b_st2 | 13.69 | 13.69 | 13.69 | 0.00 | 100 | 12.79 | 12.69 | 12.74 | 0.07 | 100 | 2.73E−03 | 0.95 | 1.9 |
| hsa-miR-214 | hsa-miR-214_st1 | 8.20 | 8.16 | 8.18 | 0.03 | 100 | 7.18 | 7.51 | 7.35 | 0.23 | 0 | 3.64E−02 | 0.83 | 1.8 |
| hsa-let-7i | hsa-let-7i_st1 | 13.38 | 13.32 | 13.35 | 0.04 | 100 | 12.60 | 12.49 | 12.54 | 0.08 | 100 | 5.81E−03 | 0.81 | 1.7 |
| hsa-miR-16 | hsa-miR-16_st2 | 13.40 | 13.19 | 13.29 | 0.15 | 100 | 12.75 | 12.63 | 12.69 | 0.08 | 100 | 3.81E−02 | 0.60 | 1.5 |
| hsa-asg-14160 | hsa-asg-14160_st1 | 6.21 | 6.43 | 6.32 | 0.15 | 50 | 2.77 | 2.14 | 2.46 | 0.45 | 0 | 7.41E−03 | 3.86 | 14.6 |
| hsa-asg-13205 | hsa-asg-13205_st1 | 7.87 | 8.59 | 8.23 | 0.51 | 100 | 4.95 | 5.36 | 5.15 | 0.29 | 0 | 1.78E−02 | 3.08 | 8.5 |
| hsa-asg-13258 | hsa-asg-13258_st2 | 8.92 | 8.11 | 8.52 | 0.57 | 100 | 6.02 | 5.45 | 5.74 | 0.40 | 0 | 3.04E−02 | 2.78 | 6.9 |
| hsa-asg-14233 | hsa-asg-14233_st1 | 10.75 | 10.40 | 10.57 | 0.25 | 100 | 7.55 | 8.37 | 7.96 | 0.58 | 100 | 2.82E−02 | 2.61 | 6.1 |
| hsa-asg-13254 | hsa-asg-13254_st1 | 6.05 | 5.39 | 5.72 | 0.46 | 0 | 2.77 | 3.53 | 3.15 | 0.54 | 0 | 3.60E−02 | 2.57 | 5.9 |
| hsa-asg-14150 | hsa-asg-14150_st1 | 7.84 | 8.25 | 8.04 | 0.29 | 100 | 5.42 | 5.53 | 5.48 | 0.08 | 0 | 6.92E−03 | 2.57 | 5.9 |
| hsa-asg-9723 | hsa-asg-9723_st2 | 5.74 | 5.05 | 5.39 | 0.48 | 100 | 3.37 | 2.61 | 2.99 | 0.54 | 0 | 4.27E−02 | 2.40 | 5.3 |
| hsa-asg-13646 | hsa-asg-13646_st1 | 8.51 | 7.77 | 8.14 | 0.53 | 100 | 5.91 | 5.77 | 5.84 | 0.10 | 0 | 2.61E−02 | 2.30 | 4.9 |
| hsa-asg-2365 | hsa-asg-2365_st1 | 6.15 | 6.34 | 6.25 | 0.13 | 50 | 3.78 | 4.39 | 4.08 | 0.43 | 0 | 2.12E−02 | 2.16 | 4.5 |
| hsa-asg-2353 | hsa-asg-2353_st1 | 5.74 | 5.21 | 5.47 | 0.37 | 0 | 3.26 | 3.90 | 3.58 | 0.45 | 0 | 4.40E−02 | 1.90 | 3.7 |
| hsa-asg-13308 | hsa-asg-13308_st2 | 8.95 | 9.11 | 9.03 | 0.12 | 100 | 7.09 | 7.50 | 7.30 | 0.29 | 0 | 1.58E−02 | 1.73 | 3.3 |
| hsa-asg-3854 | hsa-asg-3854_st1 | 5.71 | 5.75 | 5.73 | 0.03 | 0 | 4.11 | 4.24 | 4.18 | 0.09 | 0 | 1.84E−03 | 1.56 | 2.9 |
| hsa-asg-5304 | hsa-asg-5304_st1 | 9.09 | 9.11 | 9.10 | 0.01 | 100 | 7.67 | 7.58 | 7.63 | 0.06 | 50 | 9.56E−04 | 1.48 | 2.8 |
| hsa-asg-8018 | hsa-asg-8018_st1 | 5.41 | 5.05 | 5.23 | 0.25 | 0 | 3.78 | 4.00 | 3.89 | 0.16 | 0 | 2.36E−02 | 1.34 | 2.5 |
| hsa-asg-12973 | hsa-asg-12973_st2 | 5.79 | 5.46 | 5.62 | 0.23 | 50 | 4.26 | 4.34 | 4.30 | 0.06 | 0 | 1.59E−02 | 1.32 | 2.5 |
| hsa-asg-7688 | hsa-asg-7688_st1 | 6.43 | 6.38 | 6.40 | 0.04 | 100 | 4.85 | 5.43 | 5.14 | 0.41 | 50 | 4.94E−02 | 1.26 | 2.4 |
| hsa-asg-10913 | hsa-asg-10913_st1 | 6.85 | 7.01 | 6.93 | 0.12 | 100 | 5.75 | 5.72 | 5.73 | 0.02 | 0 | 5.19E−03 | 1.20 | 2.3 |
| hsa-asg-9980 | hsa-asg-9980_st1 | 6.00 | 5.55 | 5.78 | 0.32 | 50 | 4.46 | 4.72 | 4.59 | 0.18 | 0 | 4.42E−02 | 1.19 | 2.3 |
| hsa-asg-4587 | hsa-asg-4587_st1 | 5.86 | 6.03 | 5.95 | 0.12 | 50 | 4.80 | 4.74 | 4.77 | 0.04 | 0 | 5.69E−03 | 1.18 | 2.3 |
| hsa-asg-13976 | hsa-asg-13976_st2 | 5.23 | 5.73 | 5.48 | 0.35 | 0 | 4.33 | 4.39 | 4.36 | 0.04 | 0 | 4.65E−02 | 1.12 | 2.2 |
| hsa-asg-11361 | hsa-asg-11361_st2 | 4.90 | 4.72 | 4.81 | 0.12 | 0 | 3.58 | 3.81 | 3.70 | 0.16 | 0 | 1.63E−02 | 1.11 | 2.2 |
| hsa-asg-10861 | hsa-asg-10861_st2 | 5.27 | 5.03 | 5.15 | 0.17 | 0 | 3.87 | 4.29 | 4.08 | 0.30 | 0 | 4.79E−02 | 1.07 | 2.1 |
| hsa-asg-2073 | hsa-asg-2073_st1 | 5.62 | 5.29 | 5.46 | 0.24 | 0 | 4.52 | 4.34 | 4.43 | 0.13 | 0 | 3.32E−02 | 1.02 | 2.0 |
| hsa-asg-2989 | hsa-asg-2989_st1 | 5.07 | 5.05 | 5.06 | 0.01 | 0 | 4.11 | 3.98 | 4.05 | 0.10 | 0 | 4.51E−03 | 1.02 | 2.0 |
| hsa-asg-11458 | hsa-asg-11458_st2 | 6.52 | 6.52 | 6.52 | 0.00 | 100 | 5.61 | 5.45 | 5.53 | 0.12 | 50 | 6.66E−03 | 1.00 | 2.0 |
| hsa-asg-593 | hsa-asg-593_st2 | 4.59 | 4.61 | 4.60 | 0.02 | 0 | 3.68 | 3.58 | 3.63 | 0.07 | 0 | 2.95E−03 | 0.97 | 2.0 |
| hsa-asg-11196 | hsa-asg-11196_st1 | 3.62 | 3.65 | 3.63 | 0.02 | 0 | 2.64 | 2.74 | 2.69 | 0.07 | 0 | 2.65E−03 | 0.94 | 1.9 |
| hsa-asg-6717 | hsa-asg-6717_st2 | 6.52 | 6.25 | 6.39 | 0.20 | 50 | 5.42 | 5.47 | 5.44 | 0.04 | 0 | 2.15E−02 | 0.94 | 1.9 |
| hsa-asg-4924 | hsa-asg-4924_st2 | 4.94 | 5.25 | 5.10 | 0.22 | 0 | 4.26 | 4.06 | 4.16 | 0.14 | 0 | 3.70E−02 | 0.94 | 1.9 |
| hsa-asg-361 | hsa-asg-361_st1 | 6.54 | 6.49 | 6.52 | 0.03 | 100 | 5.72 | 5.49 | 5.61 | 0.16 | 50 | 1.64E−02 | 0.91 | 1.9 |
| hsa-asg-13370 | hsa-asg-13370_st2 | 5.98 | 6.09 | 6.03 | 0.07 | 50 | 5.04 | 5.35 | 5.19 | 0.22 | 0 | 3.59E−02 | 0.84 | 1.8 |
| hsa-asg-9741 | hsa-asg-9741_st2 | 6.09 | 6.00 | 6.05 | 0.06 | 50 | 5.35 | 5.11 | 5.23 | 0.17 | 0 | 2.46E−02 | 0.82 | 1.8 |
| hsa-asg-4433 | hsa-asg-4433_st1 | 5.15 | 5.25 | 5.20 | 0.07 | 0 | 4.46 | 4.44 | 4.45 | 0.02 | 0 | 4.45E−03 | 0.75 | 1.7 |
| hsa-asg-14146 | hsa-asg-14146_st1 | 5.30 | 5.61 | 5.46 | 0.22 | 0 | 4.75 | 4.77 | 4.76 | 0.01 | 0 | 4.59E−02 | 0.70 | 1.6 |
| hsa-asg-2096 | hsa-asg-2096_st1 | 3.89 | 3.74 | 3.82 | 0.11 | 0 | 3.15 | 3.16 | 3.15 | 0.01 | 0 | 1.23E−02 | 0.67 | 1.6 |
| hsa-asg-9469 | hsa-asg-9469_st1 | 6.25 | 6.29 | 6.27 | 0.03 | 100 | 5.61 | 5.61 | 5.61 | 0.00 | 50 | 7.37E−04 | 0.66 | 1.6 |
| hsa-asg-360 | hsa-asg-360_st2 | 4.75 | 4.64 | 4.69 | 0.08 | 0 | 4.04 | 4.13 | 4.08 | 0.07 | 0 | 1.42E−02 | 0.61 | 1.5 |
| hsa-asg-2094 | hsa-asg-2094_st1 | 6.32 | 6.04 | 6.18 | 0.20 | 100 | 5.58 | 5.57 | 5.57 | 0.01 | 50 | 4.89E−02 | 0.61 | 1.5 |
| hsa-asg-12179 | hsa-asg-12179_st1 | 5.96 | 6.00 | 5.98 | 0.03 | 50 | 5.52 | 5.27 | 5.39 | 0.18 | 0 | 4.36E−02 | 0.59 | 1.5 |
| hsa-asg-58 | hsa-asg-58_st1 | 4.80 | 4.96 | 4.88 | 0.12 | 0 | 4.40 | 4.24 | 4.32 | 0.11 | 0 | 3.87E−02 | 0.56 | 1.5 |
| hsa-asg-641 | hsa-asg-641_st2 | 6.34 | 6.15 | 6.25 | 0.14 | 100 | 5.75 | 5.67 | 5.71 | 0.06 | 50 | 3.60E−02 | 0.53 | 1.4 |
| hsa-miR163 | hsa-miR163_st1 | 6.41 | 6.46 | 6.44 | 0.04 | 100 | 5.88 | 5.92 | 5.90 | 0.03 | 100 | 3.69E−03 | 0.53 | 1.4 |
| hsa-asg-11883 | hsa-asg-11883_st1 | 6.77 | 6.56 | 6.66 | 0.15 | 100 | 6.13 | 6.14 | 6.14 | 0.01 | 50 | 3.87E−02 | 0.52 | 1.4 |
| hsa-asg-7542 | hsa-asg-7542_st2 | 6.32 | 6.17 | 6.25 | 0.11 | 50 | 5.78 | 5.75 | 5.76 | 0.02 | 50 | 2.53E−02 | 0.48 | 1.4 |
| hsa-asg-3263 | hsa-asg-3263_st1 | 5.46 | 5.31 | 5.38 | 0.11 | 0 | 4.85 | 4.99 | 4.92 | 0.10 | 0 | 4.62E−02 | 0.46 | 1.4 |
| hsa-asg-4114 | hsa-asg-4114_st2 | 5.19 | 5.36 | 5.28 | 0.12 | 0 | 4.85 | 4.79 | 4.82 | 0.04 | 0 | 3.56E−02 | 0.45 | 1.4 |
| hsa-asg-10172 | hsa-asg-10172_st2 | 6.54 | 6.65 | 6.60 | 0.08 | 100 | 6.17 | 6.21 | 6.19 | 0.02 | 100 | 2.06E−02 | 0.41 | 1.3 |
| hsa-asg-13143 | hsa-asg-13143_st2 | 12.95 | 13.00 | 12.98 | 0.04 | 100 | 12.67 | 12.51 | 12.59 | 0.12 | 100 | 4.82E−02 | 0.39 | 1.3 |
| hsa-asg-6926 | hsa-asg-6926_st2 | 6.13 | 6.03 | 6.08 | 0.07 | 100 | 5.78 | 5.76 | 5.77 | 0.01 | 0 | 2.51E−02 | 0.31 | 1.2 |
| hsa-asg-844 | hsa-asg-844_st1 | 3.52 | 3.45 | 3.48 | 0.05 | 0 | 3.26 | 3.21 | 3.24 | 0.03 | 0 | 3.07E−02 | 0.25 | 1.2 |
| hsa-asg-10276 | hsa-asg-10276_st1 | 3.89 | 3.92 | 3.91 | 0.02 | 0 | 4.11 | 4.20 | 4.16 | 0.06 | 0 | 3.31E−02 | −0.25 | 1.2 |
| hsa-miR145 | hsa-miR145_st1 | 5.60 | 5.55 | 5.58 | 0.03 | 50 | 5.91 | 5.81 | 5.86 | 0.06 | 50 | 2.96E−02 | −0.28 | 1.2 |
| hsa-asg-3688 | hsa-asg-3688_st2 | 5.07 | 5.09 | 5.08 | 0.01 | 0 | 5.39 | 5.41 | 5.40 | 0.02 | 50 | 3.17E−03 | −0.32 | 1.2 |
| hsa-asg-10862 | hsa-asg-10862_st2 | 5.30 | 5.39 | 5.35 | 0.06 | 100 | 5.70 | 5.88 | 5.79 | 0.13 | 100 | 4.87E−02 | −0.44 | 1.4 |
| hsa-asg-8600 | hsa-asg-8600_st2 | 5.62 | 5.61 | 5.62 | 0.01 | 50 | 6.15 | 6.10 | 6.13 | 0.04 | 100 | 2.92E−03 | −0.51 | 1.4 |
| hsa-asg-9515 | hsa-asg-9515_st1 | 4.70 | 4.77 | 4.73 | 0.05 | 0 | 5.45 | 5.22 | 5.34 | 0.16 | 50 | 3.83E−02 | −0.60 | 1.5 |
| hsa-asg-11758 | hsa-asg-11758_st2 | 8.77 | 8.90 | 8.84 | 0.09 | 50 | 9.38 | 9.62 | 9.50 | 0.17 | 50 | 3.96E−02 | −0.66 | 1.6 |
| hsa-asg-9577 | hsa-asg-9577_st1 | 5.41 | 5.27 | 5.34 | 0.10 | 0 | 5.98 | 6.12 | 6.05 | 0.10 | 0 | 1.94E−02 | −0.71 | 1.6 |
| hsa-asg-12376 | hsa-asg-12376_st2 | 5.30 | 5.43 | 5.37 | 0.09 | 0 | 6.15 | 6.02 | 6.09 | 0.09 | 50 | 1.55E−02 | −0.72 | 1.6 |
| hsa-asg-6831 | hsa-asg-6831_st2 | 5.91 | 5.79 | 5.85 | 0.08 | 0 | 6.53 | 6.82 | 6.68 | 0.20 | 50 | 3.43E−02 | −0.82 | 1.8 |
| hsa-asg-11698 | hsa-asg-11698_st2 | 7.96 | 7.83 | 7.90 | 0.10 | 100 | 8.59 | 8.93 | 8.76 | 0.24 | 100 | 4.28E−02 | −0.87 | 1.8 |
| hsa-asg-4854 | hsa-asg-4854_st2 | 4.90 | 5.01 | 4.95 | 0.08 | 0 | 5.93 | 5.83 | 5.88 | 0.07 | 50 | 6.71E−03 | −0.93 | 1.9 |
| hsa-asg-12919 | hsa-asg-12919_st2 | 8.37 | 8.10 | 8.24 | 0.19 | 100 | 9.18 | 9.40 | 9.29 | 0.16 | 100 | 2.66E−02 | −1.05 | 2.1 |
| hsa-asg-12775 | hsa-asg-12775_st1 | 6.60 | 6.65 | 6.63 | 0.04 | 100 | 8.08 | 7.77 | 7.93 | 0.22 | 100 | 1.41E−02 | −1.30 | 2.5 |
| hsa-asg-9903 | hsa-asg-9903_st2 | 3.80 | 4.00 | 3.90 | 0.14 | 0 | 5.61 | 5.57 | 5.59 | 0.03 | 50 | 3.55E−03 | −1.69 | 3.2 |
| hsa-miR-199a* | hsa-asg-14140_st1 | 12.66 | 12.43 | 12.55 | 0.16 | 100 | 10.49 | 10.90 | 10.70 | 0.29 | 100 | 1.59E−02 | 1.85 | 3.6 |
| hsa-miR-365 | hsa-cand708_st1 | 5.74 | 5.98 | 5.86 | 0.17 | 50 | 3.58 | 3.81 | 3.70 | 0.16 | 0 | 5.82E−03 | 2.16 | 4.5 |
| hsa-miR-365 | hsa-asg-13156_st1 | 6.38 | 6.80 | 6.59 | 0.30 | 100 | 4.26 | 5.18 | 4.72 | 0.65 | 0 | 6.66E−02 | 1.86 | 3.6 |

SD, standard deviation;
%, percentage of samples expressing miRNA above background levels;
Log2Diff, difference in VSN-transformed expression between LNposB and MEL samples.

### Example 15

### Colon Carcinoma Samples and RNA Isolation

[0277] FirstChoice® human total RNA from nine normal (cancer-negative) lymph node (cat#AM7894) and four normal colon (cat# AM7986) specimens was purchased from Ambion (Ambion, Inc). Seven cancer-positive lymph nodes from colon cancer patients were purchased from ProteoGenex (ProteoGenex, Inc.) (Table 15). Total RNA isolation was performed, using the mirVana miRNA Isolation Kit (Ambion, Inc.), following the manufacturer's protocol. Purified total RNA was quantified using a Nanodrop® ND-1000 (Nanodrop Technologies).

TABLE 15
Patient and tissue pathology information for seven cancer-positive lymph node
samples from patients with metastatic colon cancer. TNM Stage (Sobin and Wittekind, 2002).

| | Age | | | Overall | Lymph |
|---|---|---|---|---|---|
| | (yr)/Sex, | | TNM | Stage | Node |
| Sample | Ethnicity | Histological Diagnosis | Stage | Group | Metastases |
| LNpos4 | 55/Male | adenocarcinoma moderately to poorly | T3N2M0 | III | 6/8 lymph |
| | Caucasian | differentiated | | | nodes |
| LNpos5 | 64/Male | adenocarcinoma moderately | T3N1M1 | IV | 2/6 lymph |
| | Caucasian | differentiated | | | nodes |
| LNpos6 | 74/Male | adenocarcinoma moderately | T3N2M0 | III | 4/6 lymph |
| | Caucasian | differentiated | | | nodes |
| LNpos7 | 73/Male | adenocarcinoma moderately to poorly | T3N1M0 | III | 2/6 lymph |
| | Caucasian | differentiated | | | nodes |
| LNpos8 | 59/Female | adenocarcinoma well to poorly | T3N1M0 | III | 3/5 lymph |
| | Caucasian | differentiated | | | nodes |
| LNpos9 | 75/Female | adenocarcinoma moderately | T3N2M0 | III | 4/4 lymph |
| | Caucasian | differentiated | | | nodes |
| LNpos12 | 67/Female | adenocarcinoma well to moderately | T3N2M1 | IV | 4/4 lymph |
| | Caucasian | differentiated | | | nodes |

### Example 16

### miRNAs Differentally Expressed Between Normal Colon Tissue and Cancer-negative Lymph Nodes

[0278] To identify miRNAs that may be useful markers for metastasis of colon cancer to lymph nodes, the inventors identified miRNAs that are expressed at significantly higher levels in normal colon tissue samples than in cancer-negative lymph node samples.

[0279] miRNAs that are differentially expressed between normal colon (NCo) samples and cancer-negative lymph node (LNneg) samples, both described above in Example 15, were determined using one of two microarray platforms: mirVana™ miRNA Bioarrays V1.0 (Ambion) or the DiscovArray™ miRNA Expression Service (Asuragen). The DiscovArray™ miRNA Expression Service uses the miRChip V1.0 (described in Example 2 above).

[0280] mirVana Bioarrays. The mirVana V1.0 Bioarrays contain 377 individual miRNA probes, including 281 human miRNAs from Sanger database (V.6), 33 novel human miRNAs (Ambi-miR5), and 63 mouse or rat miRNAs from the miRBase Sequence Database (microma.sanger.ac.uk) (Griffiths-Jones et al., 2006). miRNA expression analysis was performed as described previously (Shingara et al., 2005), with the following modifications. microRNA-containing fractions were purified from 10 μg of total RNA, using a flashPAGE™ Fractionation Apparatus (Ambion). Purified small RNAs were labeled with Cy5 (GE Healthcare Life Sciences, Piscataway, N.J., USA) and hybridized to microarrays according to the manufacturer's instructions. Following hybridization, the arrays were scanned using the Axon® GenePix 400B scanner and associated GenePix software (Molecular Devices Corporation, Sunnyvale, Calif.).

[0281] mirVana Bioarray data processing. Raw array data were normalized with the variance stabilization method (VSN) (Huber et al., 2002). VSN is a global normalization process that stabilizes the variance evenly across the entire range of expression and utilizes calibration of signal followed by transformation of data to a generalized natural logarithmic space in lieu of the traditional logarithm base 2 transformation. Absolute values and differences in VSN-transformed expression are denoted by H and ΔH, respectively, and were used for all subsequent data analyses. Differences in normalized expression values between samples (ΔH) can be transformed to a generalized fold-change via exponentiation base e. These values will exhibit a compression for small differences in expression. For each array, the minimum observable threshold was determined by examining the foreground minus background median intensities for ‘EMPTY’ spots. The minimum threshold was defined as 5% symmetric trimmed mean plus 2 standard deviations across all ‘EMPTY’ spots on an individual array. For an overview of miRNA array processing and analysis, see Davison et al., (2006).

[0282] Additional data analyses. A one-way analysis of variance (ANOVA) model was used to test the hypothesis that there was no difference in expression between groups of samples for each miRNA on the array. Pair-wise comparisons for differentially expressed miRNAs identified by ANOVA were then performed to measure relative differences. For each pair of sample types (normal colon and lymph nodes), a two-sample t-test assuming equal variance was carried out for every miRNA and multiplicity correction was included to control the false discovery rate at 0.05% (Davison et al., 2006).

[0283] miRChip Microarrays. microRNA purification and labeling and miRChip expression analysis were performed as described above in Example 2.

[0284] In a preliminary study, miRNA expression was determined for three normal colon (NCo) samples and three cancer-negative lymph node (LNneg) samples, using the mirVana Bioarray platform. The inventors identified 20 miRNAs whose average expression levels in the three cancer-negative lymph node samples were significantly lower than their average expression levels in the normal colon samples (p-value<0.05; fold change≧5) (Table Co2). Among these, six miRNAs (hsa-miR-200b, -200a, -200c, -141, -215, and -375) had average expression levels that were at least 100-fold lower in the cancer-negative lymph node sample. Seven miRNAs (hsa-miR-192, -194, -429, -203, -187, and -1 and ambi-miR-7072) had average expression levels that were between 10- and 100-fold lower in the cancer-negative lymph node samples. Seven other miRNAs had average expression levels that were between 5- and 10-fold lower in cancer-negative lymph node samples.

TABLE 16
miRNAs identified with mirVana Bioarrays as being differentially expressed
between normal colon (NCo) and cancer-negative lymph nodes (LNneg).

| | | | | | ΔH NCo | | p-value |
|---|---|---|---|---|---|---|---|
| | | | Mean | Mean | vs | Fold | NCo vs |
| microRNA | % NCo | % LNneg | NCo | LNneg | LNneg | Change | LNneg |
| hsa-miR-200b | 100 | 33 | 9.47 | 3.14 | 6.33 | 561 | 1.69E−06 |
| hsa-miR-200a | 100 | 0 | 8.26 | 2.02 | 6.23 | 509 | 2.83E−04 |
| hsa-miR-200c | 100 | 100 | 9.70 | 4.75 | 4.95 | 142 | 6.41E−05 |
| hsa-miR-141 | 100 | 33 | 8.05 | 3.13 | 4.93 | 138 | 9.94E−04 |
| hsa-miR-215 | 100 | 67 | 8.25 | 3.38 | 4.87 | 130 | 8.07E−03 |
| hsa-miR-375 | 100 | 0 | 7.00 | 2.26 | 4.73 | 114 | 1.81E−04 |
| hsa-miR-192 | 100 | 100 | 10.38 | 5.78 | 4.60 | 99 | 7.28E−04 |
| hsa-miR-194 | 100 | 67 | 10.25 | 6.17 | 4.08 | 59 | 2.46E−03 |
| hsa-miR-429 | 100 | 0 | 7.26 | 3.29 | 3.97 | 53 | 1.35E−05 |
| hsa-miR-203 | 100 | 0 | 6.79 | 3.29 | 3.49 | 33 | 8.15E−05 |
| hsa-miR-187 | 100 | 100 | 5.65 | 2.28 | 3.37 | 29 | 7.41E−04 |
| ambi-miR-7072 | 100 | 33 | 4.82 | 2.11 | 2.71 | 15 | 1.05E−03 |
| hsa-miR-1 | 100 | 100 | 8.37 | 5.79 | 2.58 | 13 | 6.87E−03 |
| hsa-miR-133a | 67 | 0 | 8.94 | 6.88 | 2.05 | 8 | 2.40E−03 |
| hsa-miR-9 | 67 | 0 | 3.96 | 1.99 | 1.97 | 7 | 2.10E−02 |
| hsa-miR-137 | 100 | 100 | 3.90 | 1.98 | 1.92 | 7 | 9.29E−03 |
| hsa-miR-10a | 100 | 100 | 9.56 | 7.72 | 1.84 | 6 | 8.60E−04 |
| hsa-miR-422a | 100 | 100 | 7.95 | 6.37 | 1.57 | 5 | 6.78E−04 |
| hsa-miR-124a | 100 | 0 | 4.14 | 2.58 | 1.57 | 5 | 8.34E−03 |
| hsa-miR-422b | 100 | 100 | 9.00 | 7.44 | 1.57 | 5 | 1.93E−04 |

[0285] The miRNAs identified as differentially expressed between normal colon samples and cancer-negative lymph nodes represent useful biomarkers for indicating the presence of metastatic colon cancer cells in lymph nodes.

[0286] Independently from this experiment, the inventors also performed miRNA expression profiling and comparison with four stage III (T3N2MX) colon cancer samples and four normal colon samples, using the same microarray platform. The results revealed that none of the miRNAs, identified as differentially expressed between these normal colon and colon cancer samples were among the miRNAs most differentially expressed between cancer-negative lymph nodes and colon cancer-positive lymph nodes (data not shown). This observation suggests that, at least in the case of colon cancer, the most differentially expressed miRNAs between normal colon and normal lymph node samples are also representative of the most differentially expressed miRNAs between cancer-positive lymph nodes and cancer-negative lymph nodes.

[0287] Next, using the miRChip microarray, the inventors determined miRNA expression for four normal colon samples and nine cancer-negative lymph nodes (including the three normal colon samples and the three cancer-negative lymph nodes analyzed on mirVana Bioarrays in the preliminary study described immediately above).

[0288] The inventors identified 200 miRNAs whose average expression levels were significantly different between the normal colon samples (NCo) and the cancer-negative lymph node samples (LNneg) (t-test (LNneg vs NCo)<0.05) (Table 17). Fifty of those miRNAs (21 verified, 29 predicted) had average expression levels that were at least 5-fold lower in the cancer-negative lymph node samples than in the normal colon samples (LNneg vs NCo p-value<0.05; log 2Diff NCo vs LNneg≧2.35). Among the verified miRNAs, hsa-miR-375 and -429 had average expression levels that were at least 100-fold lower in cancer-negative lymph node samples. Hsa-miR-215 and -200a had average expression levels that were between 50- and 70-fold lower in cancer-negative lymph node samples. Ten miRNAs (hsa-miR-200b, -200c, -141, -194, -203, -200a*, 605, -192, -187, and -133b) had average expression levels that were 10- to 50-fold lower in cancer-negative lymph node samples. Seven miRNAs (hsa-miR-133a, -338, -378, -9, -487b, -495, and -582) had average expression levels that were between 5- and 10-fold lower in cancer-negative lymph node samples. Among the predicted miRNAs, seven (hsa-asg-14153_st2, -14182_st1, -7637_st2, 11715_st2, -12227_st1, -924_st1 and -10131_st2) had average expression levels that were between 10- and 53-fold lower in cancer-negative lymph node samples than in normal colon samples. Twenty-two predicted miRNAs had average expression levels that were between 5- and 10-fold lower in cancer-negative lymph node samples than in normal colon samples.

TABLE 17
MicroRNAs Differentially Expressed Between Normal Colon Samples (NCo) and
Cancer-Negative Lymph Node Samples (LNneg).

| | | NCo | | | | | | | LNneg | | | | | | | | | | | | | | |
|---|---|---|---|---|---|---|---|---|---|---|---|---|---|---|---|---|---|---|---|---|---|---|---|
| MicroRNA | Probe ID | 1 | 2 | 3 | 4 | Mean | SD | % | 1 | 2 | 3 | 4 | 5 | 6 | 7 | 8 | 9 | Mean | SD | % | ttest | log2Diff | Fold |
| hsa-miR-375 | hsa-miR-375_st1 | 12.4 | 13.4 | 11.5 | 13.6 | 12.7 | 0.97 | 100 | 6.48 | 5.40 | 6.75 | 3.46 | 3.57 | 4.22 | 1.61 | 5.17 | 6.87 | 4.84 | 1.78 | 0 | 4.88E−06 | 7.92 | 241.8 |
| hsa-miR-429 | hsa-miR-429_st1 | 11.0 | 11.1 | 9.87 | 10.4 | 10.6 | 0.60 | 100 | 4.03 | 2.29 | 4.23 | 2.80 | 3.02 | 3.30 | 2.91 | 3.08 | 5.88 | 3.51 | 1.07 | 0 | 9.57E−08 | 7.11 | 137.9 |
| hsa-miR-215 | hsa-miR-215_st1 | 11.9 | 13.3 | 10.7 | 13.1 | 12.3 | 1.20 | 100 | 7.48 | 6.27 | 6.23 | 7.17 | 6.05 | 5.34 | 6.12 | 5.65 | 5.72 | 6.23 | 0.70 | 33 | 1.49E−07 | 6.07 | 67.3 |
| hsa-miR-200a | hsa-miR-200a_st2 | 12.0 | 12.6 | 11.0 | 12.3 | 12.0 | 0.71 | 100 | 6.79 | 5.54 | 7.01 | 6.23 | 5.80 | 5.10 | 4.67 | 5.32 | 8.26 | 6.08 | 1.12 | 67 | 1.06E−06 | 5.94 | 61.4 |
| hsa-asg-14153 | hsa-asg- | 9.4 | 9.10 | 8.35 | 9.45 | 9.09 | 0.52 | 75 | 3.68 | 2.91 | 3.65 | 3.60 | 3.02 | 3.30 | 1.77 | 3.39 | 4.91 | 3.36 | 0.83 | 0 | 7.05E−08 | 5.73 | 53.0 |
| | 14153_st2 | | | | | | | | | | | | | | | | | | | | | | |
| hsa-miR- | hsa-miR- | 13.7 | 14.0 | 13.3 | 14.0 | 13.8 | 0.34 | 100 | 8.14 | 8.24 | 9.42 | 7.20 | 7.32 | 7.35 | 7.12 | 8.18 | 10.9 | 8.21 | 1.25 | 100 | 3.07E−06 | 5.61 | 48.9 |
| 200b | 200b_st1 | | | | | | | | | | | | | | | | | | | | | | |
| hsa-asg- | hsa-asg- | 8.5 | 8.62 | 5.81 | 7.60 | 7.65 | 1.32 | 75 | 3.10 | 1.76 | 2.60 | 2.52 | 3.24 | 2.48 | 3.38 | 2.56 | 1.52 | 2.57 | 0.63 | 0 | 1.00E−06 | 5.08 | 33.8 |
| 14182 | 14182_st1 | | | | | | | | | | | | | | | | | | | | | | |
| hsa-asg- | hsa-asg- | 9.4 | 9.29 | 8.73 | 9.53 | 9.24 | 0.36 | 100 | 4.24 | 3.16 | 5.01 | 4.03 | 4.48 | 4.55 | 3.88 | 4.21 | 5.76 | 4.37 | 0.73 | 0 | 7.60E−08 | 4.87 | 29.3 |
| 7637 | 7637_st2 | | | | | | | | | | | | | | | | | | | | | | |
| hsa-miR- | hsa-miR- | 14.0 | 14.6 | 13.6 | 14.5 | 14.2 | 0.46 | 100 | 10.1 | 9.29 | 10.8 | 8.68 | 8.64 | 8.61 | 8.59 | 9.41 | 12.0 | 9.57 | 1.20 | 100 | 1.35E−05 | 4.66 | 25.3 |
| 200c | 200c_st1 | | | | | | | | | | | | | | | | | | | | | | |
| hsa-miR-141 | hsa-miR- | 9.0 | 10.6 | 7.64 | 9.23 | 9.16 | 1.24 | 100 | 5.60 | 4.34 | 5.46 | 4.96 | 4.92 | 3.44 | 4.45 | 4.39 | 5.05 | 4.73 | 0.66 | 0 | 3.31E−06 | 4.42 | 21.5 |
| | 141_st1 | | | | | | | | | | | | | | | | | | | | | | |
| hsa-miR- | hsa-miR- | 13.3 | 14.9 | 12.5 | 13.9 | 13.7 | 1.00 | 100 | 10.3 | 9.81 | 9.43 | 9.85 | 9.44 | 8.82 | 9.17 | 8.74 | 9.53 | 9.46 | 0.51 | 100 | 4.87E−07 | 4.26 | 19.2 |
| 194 | 194_st2 | | | | | | | | | | | | | | | | | | | | | | |
| hsa-miR- | hsa-miR- | 11.8 | 10.8 | 11.6 | 11.2 | 11.4 | 0.42 | 100 | 7.84 | 6.34 | 7.73 | 8.74 | 6.95 | 5.90 | 5.80 | 6.60 | 9.84 | 7.31 | 1.36 | 78 | 1.20E−04 | 4.10 | 17.2 |
| 203 | 203_st2 | | | | | | | | | | | | | | | | | | | | | | |
| hsa-miR-200a* | hsa-miR-200a-_st2 | 8.0 | 7.78 | 6.67 | 7.35 | 7.46 | 0.60 | 100 | 3.68 | 3.46 | 2.84 | 4.46 | 3.24 | 2.48 | 2.74 | 3.78 | 3.51 | 3.36 | 0.61 | 0 | 2.18E−07 | 4.10 | 17.2 |
| hsa-miR- | hsa-miR- | 7.0 | 7.43 | 6.85 | 7.26 | 7.14 | 0.25 | 100 | 3.26 | 2.83 | 3.65 | 1.52 | 2.45 | 2.83 | 3.52 | 3.66 | 4.98 | 3.19 | 0.96 | 0 | 6.92E−06 | 3.95 | 15.5 |
| 605 | 605_st1 | | | | | | | | | | | | | | | | | | | | | | |
| hsa-asg- | hsa-asg- | 6.3 | 6.91 | 6.10 | 5.76 | 6.29 | 0.49 | 75 | 2.57 | 3.00 | 2.84 | 2.24 | 2.78 | 2.48 | 1.24 | 2.19 | 3.95 | 2.59 | 0.73 | 0 | 1.72E−06 | 3.70 | 13.0 |
| 11715 | 11715_st2 | | | | | | | | | | | | | | | | | | | | | | |
| hsa-asg- | hsa-asg- | 7.0 | 6.58 | 5.06 | 6.71 | 6.34 | 0.87 | 50 | 2.38 | 1.59 | 2.84 | 1.96 | 2.62 | 2.66 | 3.38 | 3.24 | 3.35 | 2.67 | 0.62 | 0 | 2.74E−06 | 3.67 | 12.7 |
| 12227 | 12227_st1 | | | | | | | | | | | | | | | | | | | | | | |
| hsa-asg- | hsa-asg- | 5.3 | 10.8 | 4.52 | 9.82 | 7.62 | 3.17 | 50 | 5.20 | 4.79 | 3.97 | 4.99 | 3.31 | 3.37 | 2.74 | 3.39 | 4.07 | 3.98 | 0.86 | 0 | 6.52E−03 | 3.63 | 12.4 |
| 924 | 924_st1 | | | | | | | | | | | | | | | | | | | | | | |
| hsa-miR- | hsa-miR- | 13.5 | 14.2 | 13.0 | 14.1 | 13.7 | 0.53 | 100 | 11.3 | 10.3 | 10.6 | 10.5 | 10.0 | 9.19 | 9.94 | 9.33 | 10.1 | 10.1 | 0.66 | 100 | 1.18E−06 | 3.60 | 12.1 |
| 192 | 192_st2 | | | | | | | | | | | | | | | | | | | | | | |
| hsa-miR- | hsa-miR- | 6.4 | 9.31 | 4.82 | 9.47 | 7.52 | 2.26 | 75 | 5.30 | 3.39 | 3.38 | 4.33 | 3.80 | 3.93 | 3.65 | 3.96 | 3.74 | 3.94 | 0.59 | 0 | 7.08E−04 | 3.58 | 12.0 |
| 187 | 187_st1 | | | | | | | | | | | | | | | | | | | | | | |
| hsa-miR- | hsa-miR- | 11.4 | 9.69 | 10.3 | 10.9 | 10.5 | 0.74 | 100 | 7.88 | 6.67 | 5.01 | 10.6 | 7.95 | 6.69 | 7.83 | 5.01 | 5.88 | 7.07 | 1.78 | 67 | 3.28E−03 | 3.52 | 11.5 |
| 133b | 133b_st2 | | | | | | | | | | | | | | | | | | | | | | |
| hsa-asg- | hsa-asg- | 6.3 | 7.69 | 6.89 | 7.67 | 7.16 | 0.64 | 100 | 3.92 | 3.72 | 4.10 | 3.15 | 3.17 | 3.82 | 3.23 | 3.78 | 5.59 | 3.83 | 0.75 | 0 | 9.42E−06 | 3.32 | 10.0 |
| 10131 | 10131_st2 | | | | | | | | | | | | | | | | | | | | | | |
| hsa-miR- | hsa-miR-133a_st1 | 12.0 | 10.5 | 11.1 | 11.6 | 11.3 | 0.64 | 100 | 8.29 | 8.15 | 6.45 | 11.3 | 8.69 | 7.61 | 8.83 | 6.78 | 6.96 | 8.12 | 1.47 | 89 | 1.53E−03 | 3.25 | 9.5 |
| 133a | | | | | | | | | | | | | | | | | | | | | | | |
| hsa-asg- | hsa-asg- | 6.4 | 8.04 | 6.16 | 7.67 | 7.07 | 0.92 | 100 | 3.68 | 3.16 | 5.34 | 3.07 | 3.17 | 3.37 | 3.77 | 4.47 | 4.68 | 3.86 | 0.80 | 0 | 5.12E−05 | 3.21 | 9.3 |
| 1296 | 1296_st1 | | | | | | | | | | | | | | | | | | | | | | |
| hsa-asg- | hsa-asg- | 6.3 | 6.74 | 5.77 | 6.62 | 6.37 | 0.43 | 75 | 3.10 | 3.31 | 2.60 | 2.62 | 2.70 | 3.15 | 3.52 | 3.24 | 4.19 | 3.16 | 0.50 | 0 | 2.82E−07 | 3.21 | 9.2 |
| 5119 | 5119_st1 | | | | | | | | | | | | | | | | | | | | | | |
| hsa-asg- | hsa-asg- | 6.5 | 6.68 | 5.39 | 6.64 | 6.31 | 0.62 | 75 | 3.41 | 2.83 | 4.57 | 2.43 | 2.86 | 3.00 | 0.98 | 3.78 | 4.50 | 3.15 | 1.10 | 0 | 2.56E−04 | 3.16 | 9.0 |
| 10247 | 10247_st1 | | | | | | | | | | | | | | | | | | | | | | |
| hsa-asg- | hsa-asg- | 5.9 | 5.61 | 5.45 | 6.82 | 5.95 | 0.61 | 75 | 3.41 | 3.00 | 3.28 | 2.98 | 2.37 | 2.83 | 2.21 | 2.74 | 4.07 | 2.99 | 0.56 | 0 | 3.35E−06 | 2.97 | 7.8 |
| 12139 | 12139_st2 | | | | | | | | | | | | | | | | | | | | | | |
| hsa-asg- | hsa-asg-3822_st2 | 6.0 | 6.73 | 5.63 | 6.68 | 6.27 | 0.53 | 50 | 2.75 | 3.59 | 4.23 | 2.71 | 3.10 | 2.83 | 2.21 | 3.53 | 5.29 | 3.36 | 0.94 | 0 | 1.33E−04 | 2.91 | 7.5 |
| 3822 | | | | | | | | | | | | | | | | | | | | | | | |
| hsa-asg- | hsa-asg- | 6.5 | 6.35 | 5.54 | 6.10 | 6.13 | 0.44 | 100 | 2.75 | 3.16 | 4.23 | 3.15 | 2.20 | 3.44 | 3.23 | 3.08 | 4.30 | 3.28 | 0.66 | 0 | 8.39E−06 | 2.85 | 7.2 |
| 13908 | 13908_st2 | | | | | | | | | | | | | | | | | | | | | | |
| hsa-asg- | hsa-asg-9980_st1 | 6.3 | 7.71 | 7.20 | 7.77 | 7.26 | 0.65 | 100 | 5.71 | 4.97 | 4.57 | 2.43 | 3.96 | 3.44 | 4.45 | 5.61 | 5.17 | 4.48 | 1.07 | 11 | 5.70E−04 | 2.78 | 6.9 |
| 9980 | | | | | | | | | | | | | | | | | | | | | | | |
| hsa-asg- | hsa-asg- | 6.4 | 7.55 | 6.26 | 7.69 | 7.00 | 0.73 | 100 | 5.60 | 4.06 | 5.01 | 4.69 | 3.96 | 1.96 | 3.65 | 4.63 | 4.50 | 4.23 | 1.03 | 0 | 5.44E−04 | 2.77 | 6.8 |
| 14208 | 14208_st1 | | | | | | | | | | | | | | | | | | | | | | |
| hsa-asg- | hsa-asg- | 5.8 | 5.65 | 5.26 | 5.86 | 5.66 | 0.29 | 75 | 2.38 | 1.76 | 4.35 | 2.98 | 3.31 | 3.00 | 0.98 | 3.78 | 3.81 | 2.93 | 1.07 | 0 | 4.58E−04 | 2.74 | 6.7 |
| 13705 | 13705_st1 | | | | | | | | | | | | | | | | | | | | | | |
| hsa-asg- | hsa-asg- | 6.6 | 6.59 | 5.96 | 6.99 | 6.54 | 0.43 | 100 | 3.92 | 4.58 | 3.47 | 3.60 | 3.51 | 3.82 | 3.38 | 3.39 | 4.68 | 3.82 | 0.50 | 0 | 1.25E−06 | 2.73 | 6.6 |
| 8174 | 8174_st1 | | | | | | | | | | | | | | | | | | | | | | |
| hsa-asg- | hsa-asg- | 5.5 | 9.09 | 5.29 | 10.1 | 7.51 | 2.48 | 50 | 4.79 | 5.48 | 4.17 | 4.83 | 5.96 | 5.68 | 3.52 | 3.72 | 4.94 | 4.79 | 0.85 | 0 | 1.11E−02 | 2.72 | 6.6 |
| 4209 | 4209_st2 | | | | | | | | | | | | | | | | | | | | | | |
| hsa-miR- | hsa-miR- | 7.3 | 9.13 | 5.57 | 8.29 | 7.58 | 1.53 | 100 | 5.64 | 4.58 | 6.09 | 5.38 | 4.58 | 2.83 | 5.38 | 4.01 | 5.40 | 4.88 | 1.00 | 11 | 2.66E−03 | 2.70 | 6.5 |
| 338 | 338_st1 | | | | | | | | | | | | | | | | | | | | | | |
| hsa- | hsa- | 6.1 | 6.72 | 5.32 | 5.96 | 6.03 | 0.57 | 50 | 3.68 | 2.65 | 3.47 | 3.60 | 2.94 | 3.30 | 3.52 | 2.74 | 4.07 | 3.33 | 0.47 | 0 | 2.17E−06 | 2.70 | 6.5 |
| cand852 | cand852_st2 | | | | | | | | | | | | | | | | | | | | | | |
| hsa-asg- | hsa-asg- | 5.7 | 5.85 | 5.59 | 5.92 | 5.78 | 0.14 | 25 | 4.03 | 2.47 | 2.36 | 2.24 | 2.94 | 2.48 | 3.52 | 3.39 | 4.50 | 3.10 | 0.80 | 0 | 4.68E−05 | 2.68 | 6.4 |
| 4219 | 4219_st1 | | | | | | | | | | | | | | | | | | | | | | |
| hsa-miR- | hsa-miR- | 7.5 | 8.10 | 6.55 | 7.42 | 7.41 | 0.65 | 75 | 5.25 | 4.94 | 5.37 | 6.89 | 5.97 | 2.83 | 6.77 | 4.16 | 1.42 | 4.85 | 1.80 | 22 | 1.99E−02 | 2.57 | 5.9 |
| 378 | 378_st1 | | | | | | | | | | | | | | | | | | | | | | |
| hsa-miR-9 | hsa-miR-9_st2 | 8.1 | 5.32 | 5.96 | 6.44 | 6.46 | 1.20 | 100 | 4.03 | 4.06 | 3.47 | 3.86 | 4.19 | 2.83 | 4.09 | 3.90 | 4.68 | 3.90 | 0.51 | 0 | 1.68E−04 | 2.56 | 5.9 |
| hsa-miR-9 | hsa-cand90_st2 | 7.4 | 5.21 | 4.52 | 5.83 | 5.75 | 1.25 | 25 | 4.14 | 3.72 | 3.28 | 3.60 | 3.45 | 2.83 | 3.23 | 2.37 | 4.19 | 3.42 | 0.58 | 0 | 6.36E−04 | 2.33 | 5.0 |
| hsa-asg- | hsa-asg- | 6.4 | 6.44 | 6.11 | 6.50 | 6.37 | 0.18 | 75 | 3.41 | 3.72 | 3.97 | 3.67 | 3.51 | 3.30 | 3.08 | 4.11 | 5.64 | 3.82 | 0.75 | 0 | 4.15E−05 | 2.55 | 5.8 |
| 11160 | 11160_st2 | | | | | | | | | | | | | | | | | | | | | | |
| hsa-asg- | hsa-asg- | 6.3 | 6.24 | 6.41 | 7.09 | 6.52 | 0.38 | 100 | 3.41 | 4.06 | 3.97 | 3.86 | 4.19 | 3.93 | 4.45 | 3.24 | 4.83 | 3.99 | 0.49 | 0 | 1.79E−06 | 2.53 | 5.8 |
| 11361 | 11361_st2 | | | | | | | | | | | | | | | | | | | | | | |
| hsa- | hsa- | 5.2 | 6.25 | 5.58 | 6.04 | 5.79 | 0.44 | 25 | 3.55 | 2.47 | 3.81 | 3.92 | 3.38 | 1.63 | 4.19 | 3.08 | 3.35 | 3.26 | 0.79 | 0 | 1.05E−04 | 2.53 | 5.8 |
| cand318 | cand318_st1 | | | | | | | | | | | | | | | | | | | | | | |
| hsa-asg- | hsa-asg- | 5.4 | 6.24 | 5.22 | 6.20 | 5.78 | 0.52 | 50 | 4.33 | 3.16 | 2.84 | 3.31 | 3.38 | 3.93 | 2.39 | 2.91 | 3.16 | 3.27 | 0.58 | 0 | 1.28E−05 | 2.52 | 5.7 |
| 5190 | 5190_st1 | | | | | | | | | | | | | | | | | | | | | | |
| hsa-asg- | hsa-asg- | 5.6 | 5.21 | 5.32 | 6.46 | 5.67 | 0.56 | 50 | 2.38 | 3.46 | 3.47 | 2.43 | 2.70 | 2.66 | 3.38 | 3.24 | 4.68 | 3.15 | 0.72 | 0 | 7.25E−05 | 2.51 | 5.7 |
| 4978 | 4978_st2 | | | | | | | | | | | | | | | | | | | | | | |
| hsa- | hsa- | 7.4 | 8.91 | 6.50 | 9.29 | 8.03 | 1.30 | 100 | 6.64 | 6.07 | 6.56 | 4.62 | 4.24 | 5.25 | 5.89 | 4.63 | 5.95 | 5.54 | 0.89 | 22 | 1.79E−03 | 2.50 | 5.6 |
| cand26 | cand26_st2 | | | | | | | | | | | | | | | | | | | | | | |
| hsa-miR- | hsa-miR- | 8.7 | 8.33 | 8.34 | 8.95 | 8.59 | 0.31 | 100 | 6.59 | 6.30 | 7.48 | 7.41 | 6.76 | 5.89 | 5.51 | 4.30 | 4.91 | 6.13 | 1.08 | 67 | 1.10E−03 | 2.47 | 5.5 |
| 487b | 487b_st2 | | | | | | | | | | | | | | | | | | | | | | |
| hsa-asg- | hsa-asg- | 5.7 | 6.58 | 5.20 | 6.35 | 5.96 | 0.62 | 25 | 4.03 | 2.83 | 3.97 | 3.39 | 3.75 | 2.83 | 3.88 | 3.66 | 3.16 | 3.50 | 0.47 | 0 | 6.90E−06 | 2.46 | 5.5 |
| 3469 | 3469_st2 | | | | | | | | | | | | | | | | | | | | | | |
| hsa- | hsa- | 3.1 | 8.36 | 3.05 | 7.59 | 5.53 | 2.84 | 50 | 4.03 | 3.31 | 2.36 | 3.73 | 1.87 | 2.31 | 4.37 | 2.56 | 3.16 | 3.08 | 0.86 | 0 | 3.13E−02 | 2.45 | 5.5 |
| cand317 | cand317_st1 | | | | | | | | | | | | | | | | | | | | | | |
| hsa-miR-495 | hsa-miR-495_st1 | 8.9 | 8.07 | 7.47 | 8.44 | 8.23 | 0.61 | 100 | 6.54 | 5.29 | 7.48 | 6.77 | 6.82 | 4.94 | 5.76 | 3.08 | 5.40 | 5.79 | 1.32 | 56 | 5.22E−03 | 2.44 | 5.4 |
| hsa-miR-582 | hsa-miR-582_st1 | 8.1 | 6.95 | 7.69 | 7.09 | 7.47 | 0.57 | 100 | 6.37 | 2.83 | 5.08 | 6.47 | 5.41 | 4.62 | 4.67 | 4.89 | 5.17 | 5.06 | 1.07 | 22 | 1.53E−03 | 2.41 | 5.3 |
| hsa-asg- | hsa-asg- | 7.5 | 8.99 | 6.35 | 9.13 | 8.00 | 1.31 | 100 | 6.15 | 6.12 | 5.76 | 5.43 | 5.31 | 5.25 | 5.76 | 5.01 | 6.09 | 5.65 | 0.42 | 22 | 3.72E−04 | 2.35 | 5.1 |
| 13135 | 13135_st1 | | | | | | | | | | | | | | | | | | | | | | |
| hsa-miR-411 | hsa-miR-411_st1 | 7.8 | 7.03 | 5.57 | 6.46 | 6.72 | 0.96 | 75 | 5.39 | 4.25 | 5.08 | 5.75 | 6.07 | 3.58 | 3.99 | 2.91 | 2.77 | 4.42 | 1.21 | 11 | 6.64E−03 | 2.30 | 4.9 |
| hsa-miR- | hsa-miR- | 6.8 | 6.09 | 5.29 | 5.73 | 6.00 | 0.67 | 50 | 3.41 | 3.00 | 4.76 | 3.97 | 4.75 | 3.58 | 4.09 | 2.01 | 3.81 | 3.71 | 0.86 | 0 | 6.68E−04 | 2.29 | 4.9 |
| 381 | 381_st2 | | | | | | | | | | | | | | | | | | | | | | |
| hsa-asg- | hsa-asg- | 5.3 | 6.61 | 5.19 | 6.37 | 5.87 | 0.73 | 50 | 3.81 | 3.31 | 5.01 | 2.80 | 3.17 | 2.83 | 2.39 | 4.01 | 5.05 | 3.60 | 0.95 | 0 | 1.44E−03 | 2.27 | 4.8 |
| 280_st1 | 280_st1 | | | | | | | | | | | | | | | | | | | | | | |
| hsa-asg-1596 | hsa-asg-1596_st2 | 6.8 | 7.41 | 6.88 | 7.05 | 7.04 | 0.26 | 100 | 4.98 | 5.58 | 4.57 | 3.80 | 4.92 | 4.69 | 4.74 | 4.76 | 4.91 | 4.77 | 0.47 | 0 | 2.16E−06 | 2.27 | 4.8 |
| hsa-asg- | hsa-asg- | 5.7 | 5.21 | 4.78 | 6.60 | 5.59 | 0.79 | 50 | 4.33 | 3.46 | 4.10 | 3.15 | 3.45 | 2.66 | 3.38 | 2.37 | 3.16 | 3.34 | 0.62 | 0 | 1.61E−04 | 2.25 | 4.7 |
| 12907 | 12907_st2 | | | | | | | | | | | | | | | | | | | | | | |
| hsa-asg- | hsa-asg- | 7.6 | 8.78 | 6.12 | 9.09 | 7.91 | 1.34 | 100 | 6.25 | 5.50 | 6.58 | 5.95 | 5.31 | 5.95 | 4.81 | 5.57 | 5.72 | 5.74 | 0.52 | 22 | 1.18E−03 | 2.17 | 4.5 |
| 10881 | 10881_st1 | | | | | | | | | | | | | | | | | | | | | | |
| hsa-miR-1 | hsa-miR-1_st1 | 12.8 | 12.7 | 12.2 | 12.8 | 12.6 | 0.29 | 100 | 11.6 | 11.2 | 8.69 | 12.2 | 11.2 | 10.4 | 10.7 | 8.18 | 9.95 | 10.4 | 1.35 | 100 | 9.88E−03 | 2.16 | 4.5 |
| hsa-asg- | hsa-asg- | 8.1 | 7.24 | 6.46 | 7.41 | 7.33 | 0.71 | 100 | 5.71 | 4.91 | 7.51 | 6.57 | 6.42 | 4.08 | 5.20 | 3.66 | 2.77 | 5.20 | 1.52 | 22 | 2.41E−02 | 2.12 | 4.4 |
| 5021 | 5021_st1 | | | | | | | | | | | | | | | | | | | | | | |
| hsa-miR- | hsa-miR- | 10.0 | 14.4 | 9.18 | 13.6 | 11.8 | 2.60 | 100 | 10.9 | 10.2 | 9.46 | 10.6 | 9.21 | 9.07 | 8.33 | 9.20 | 10.5 | 9.74 | 0.88 | 100 | 4.67E−02 | 2.09 | 4.3 |
| 31 | 31_st2 | | | | | | | | | | | | | | | | | | | | | | |
| hsa-miR- | hsa-miR- | 8.4 | 7.72 | 8.08 | 7.63 | 7.96 | 0.36 | 100 | 6.60 | 6.25 | 5.46 | 7.74 | 6.68 | 5.05 | 5.55 | 4.11 | 5.45 | 5.88 | 1.06 | 44 | 3.24E−03 | 2.08 | 4.2 |
| 189 | 189_st1 | | | | | | | | | | | | | | | | | | | | | | |
| hsa-miR- | hsa-miR- | 9.8 | 9.40 | 7.61 | 8.56 | 8.84 | 0.97 | 100 | 7.01 | 6.97 | 8.21 | 8.58 | 8.20 | 5.73 | 6.24 | 4.55 | 5.59 | 6.79 | 1.38 | 67 | 2.18E−02 | 2.06 | 4.2 |
| 368 | 368_st2 | | | | | | | | | | | | | | | | | | | | | | |
| hsa-asg- | hsa-asg- | 5.4 | 6.12 | 5.42 | 5.96 | 5.73 | 0.36 | 75 | 3.68 | 2.65 | 4.10 | 4.08 | 3.45 | 2.66 | 3.99 | 3.39 | 5.11 | 3.68 | 0.77 | 0 | 3.92E−04 | 2.05 | 4.2 |
| 548 | 548_st1 | | | | | | | | | | | | | | | | | | | | | | |
| hsa-asg- | hsa-asg- | 7.2 | 7.55 | 7.02 | 7.83 | 7.40 | 0.36 | 100 | 6.60 | 5.14 | 5.40 | 5.43 | 5.18 | 5.10 | 5.42 | 4.55 | 5.34 | 5.35 | 0.54 | 11 | 2.95E−05 | 2.05 | 4.1 |
| 12666 | 12666_st2 | | | | | | | | | | | | | | | | | | | | | | |
| hsa-miR-9* | hsa-miR-9-_st2 | 8.8 | 7.73 | 7.34 | 8.53 | 8.12 | 0.71 | 100 | 6.72 | 6.56 | 6.09 | 6.62 | 5.92 | 6.35 | 5.55 | 5.27 | 5.72 | 6.09 | 0.51 | 44 | 1.01E−04 | 2.04 | 4.1 |
| hsa-miR-493-5p | hsa-miR-493- | 7.5 | 6.47 | 8.24 | 6.77 | 7.25 | 0.79 | 100 | 4.92 | 4.34 | 7.40 | 6.69 | 6.83 | 4.22 | 4.99 | 2.56 | 5.11 | 5.23 | 1.52 | 33 | 3.12E−02 | 2.02 | 4.1 |
| | 5p_st1 | | | | | | | | | | | | | | | | | | | | | | |
| hsa-miR- | hsa-asg- | 7.3 | 3.95 | 6.99 | 3.81 | 5.53 | 1.92 | 50 | 3.68 | 3.84 | 4.23 | 2.43 | 2.37 | 3.30 | 3.65 | 2.37 | 5.92 | 3.53 | 1.13 | 11 | 3.57E−02 | 2.00 | 4.0 |
| 592 | 4400_st1 | | | | | | | | | | | | | | | | | | | | | | |
| hsa-asg- | hsa-asg- | 4.4 | 5.52 | 3.48 | 5.66 | 4.78 | 1.02 | 50 | 3.26 | 3.31 | 3.28 | 2.71 | 3.02 | 2.48 | 2.03 | 2.28 | 2.77 | 2.79 | 0.46 | 0 | 4.12E−04 | 1.98 | 4.0 |
| 12107 | 12107_st1 | | | | | | | | | | | | | | | | | | | | | | |
| hsa-asg- | hsa-asg- | 11.6 | 11.3 | 10.9 | 11.0 | 11.2 | 0.29 | 100 | 9.14 | 9.03 | 9.21 | 9.91 | 9.27 | 8.84 | 9.82 | 9.28 | 8.97 | 9.28 | 0.37 | 100 | 1.30E−06 | 1.97 | 3.9 |
| 3998 | 3998_st1 | | | | | | | | | | | | | | | | | | | | | | |
| hsa-asg- | hsa-asg- | 7.6 | 7.98 | 7.94 | 7.94 | 7.87 | 0.17 | 25 | 7.62 | 6.85 | 4.23 | 6.07 | 6.96 | 7.03 | 4.77 | 5.17 | 4.40 | 5.90 | 1.28 | 0 | 1.24E−02 | 1.97 | 3.9 |
| 12815 | 12815_st2 | | | | | | | | | | | | | | | | | | | | | | |
| hsa-asg-6277 | hsa-asg-6277_st2 | 8.7 | 7.74 | 9.19 | 8.30 | 8.50 | 0.62 | 100 | 7.41 | 7.43 | 5.60 | 6.46 | 6.99 | 7.49 | 5.55 | 6.87 | 5.08 | 6.54 | 0.92 | 67 | 2.76E−03 | 1.96 | 3.9 |
| hsa-asg- | hsa-asg- | 7.5 | 7.34 | 7.03 | 8.26 | 7.55 | 0.52 | 100 | 6.28 | 6.44 | 5.31 | 5.77 | 6.00 | 6.74 | 3.65 | 5.70 | 4.45 | 5.59 | 0.99 | 22 | 3.74E−03 | 1.96 | 3.9 |
| 14148 | 14148_st2 | | | | | | | | | | | | | | | | | | | | | | |
| hsa-miR- | hsa-miR- | 7.0 | 6.54 | 5.19 | 5.37 | 6.03 | 0.89 | 50 | 4.33 | 3.16 | 4.85 | 4.90 | 5.43 | 3.70 | 3.77 | 2.01 | 4.50 | 4.07 | 1.04 | 0 | 7.78E−03 | 1.96 | 3.9 |
| 154 | 154_st2 | | | | | | | | | | | | | | | | | | | | | | |
| hsa-asg- | hsa-asg- | 8.5 | 8.13 | 7.68 | 8.83 | 8.30 | 0.51 | 100 | 6.82 | 6.23 | 6.75 | 7.00 | 6.46 | 5.34 | 6.40 | 5.22 | 6.96 | 6.35 | 0.66 | 78 | 2.89E−04 | 1.95 | 3.9 |
| 14146 | 14146_st1 | | | | | | | | | | | | | | | | | | | | | | |
| hsa-miR-299-5p | hsa-miR-299- | 8.1 | 7.11 | 6.25 | 7.29 | 7.19 | 0.77 | 100 | 6.25 | 4.97 | 6.33 | 6.89 | 6.50 | 3.58 | 5.66 | 3.08 | 4.50 | 5.31 | 1.35 | 44 | 2.61E−02 | 1.89 | 3.7 |
| | 5p_st2 | | | | | | | | | | | | | | | | | | | | | | |
| hsa-miR-7 | hsa-miR-7_st1 | 10.5 | 11.7 | 10.1 | 11.5 | 11.0 | 0.78 | 100 | 9.97 | 8.68 | 10.2 | 9.12 | 8.69 | 8.18 | 9.27 | 9.10 | 8.96 | 9.13 | 0.64 | 100 | 7.34E−04 | 1.89 | 3.7 |
| hsa- | hsa- | 4.7 | 5.81 | 3.27 | 5.42 | 4.81 | 1.12 | 50 | 2.38 | 3.00 | 3.07 | 3.23 | 3.02 | 2.83 | 3.38 | 3.72 | 1.71 | 2.93 | 0.59 | 0 | 1.82E−03 | 1.88 | 3.7 |
| cand825 | cand825_st1 | | | | | | | | | | | | | | | | | | | | | | |
| hsa-asg-3912 | hsa-asg-3912_st1 | 4.6 | 4.19 | 4.78 | 5.73 | 4.83 | 0.65 | 25 | 2.38 | 3.16 | 3.47 | 2.33 | 2.86 | 1.96 | 3.52 | 2.83 | 4.07 | 2.95 | 0.67 | 0 | 6.58E−04 | 1.88 | 3.7 |
| hsa-miR- | hsa-miR- | 5.5 | 5.52 | 4.15 | 5.92 | 5.29 | 0.78 | 25 | 5.15 | 3.46 | 3.81 | 3.60 | 3.45 | 2.13 | 2.57 | 2.74 | 3.81 | 3.41 | 0.88 | 0 | 3.79E−03 | 1.88 | 3.7 |
| 577 | 577_st1 | | | | | | | | | | | | | | | | | | | | | | |
| hsa-miR- | hsa-miR- | 12.0 | 11.6 | 11.2 | 11.4 | 11.5 | 0.36 | 100 | 9.61 | 9.46 | 9.68 | 10.3 | 9.48 | 9.33 | 10.3 | 9.76 | 9.62 | 9.73 | 0.35 | 100 | 2.72E−06 | 1.86 | 3.6 |
| 422a | 422a_st1 | | | | | | | | | | | | | | | | | | | | | | |
| hsa-asg- | hsa-asg- | 5.9 | 6.15 | 6.14 | 6.23 | 6.12 | 0.11 | 100 | 5.30 | 3.84 | 4.57 | 4.69 | 4.06 | 4.31 | 4.45 | 2.91 | 4.19 | 4.26 | 0.66 | 0 | 1.84E−04 | 1.86 | 3.6 |
| 1268 | 1268_st1 | | | | | | | | | | | | | | | | | | | | | | |
| hsa-miR- | hsa-miR- | 7.2 | 5.47 | 7.34 | 5.30 | 6.33 | 1.09 | 50 | 3.10 | 5.71 | 4.71 | 4.46 | 4.40 | 5.99 | 4.28 | 2.28 | 5.37 | 4.48 | 1.20 | 0 | 2.31E−02 | 1.85 | 3.6 |
| 654 | 654_st1 | | | | | | | | | | | | | | | | | | | | | | |
| hsa-miR- | hsa-asg- | 6.4 | 5.32 | 5.36 | 5.28 | 5.60 | 0.57 | 25 | 2.38 | 3.72 | 4.35 | 4.28 | 4.95 | 3.00 | 4.28 | 3.39 | 3.67 | 3.78 | 0.79 | 0 | 1.66E−03 | 1.82 | 3.5 |
| 329 | 13589_st2 | | | | | | | | | | | | | | | | | | | | | | |
| hsa-miR- | hsa-asg- | 6.7 | 5.47 | 4.82 | 5.69 | 5.69 | 0.81 | 50 | 4.65 | 3.46 | 4.76 | 3.97 | 4.78 | 4.03 | 4.60 | 3.24 | 4.07 | 4.17 | 0.57 | 0 | 2.38E−03 | 1.51 | 2.9 |
| 329 | 13204_st2 | | | | | | | | | | | | | | | | | | | | | | |
| hsa-miR-329 | hsa-miR-329_st1 | 6.6 | 4.96 | 4.63 | 5.50 | 5.43 | 0.88 | 25 | 4.33 | 3.59 | 5.15 | 3.86 | 5.10 | 3.44 | 3.38 | 3.90 | 3.35 | 4.01 | 0.70 | 0 | 9.72E−03 | 1.42 | 2.7 |
| hsa-asg- | hsa-asg- | 8.0 | 7.30 | 6.36 | 7.26 | 7.25 | 0.69 | 100 | 6.12 | 5.83 | 7.17 | 6.40 | 6.41 | 4.55 | 5.34 | 3.08 | 3.95 | 5.43 | 1.33 | 56 | 2.72E−02 | 1.82 | 3.5 |
| 13254 | 13254_st1 | | | | | | | | | | | | | | | | | | | | | | |
| hsa-asg- | hsa-asg- | 11.1 | 7.52 | 11.4 | 8.25 | 9.60 | 2.00 | 100 | 7.38 | 8.68 | 6.81 | 6.89 | 8.24 | 8.69 | 7.04 | 8.08 | 8.27 | 7.79 | 0.76 | 100 | 3.24E−02 | 1.81 | 3.5 |
| 8922 | 8922_st2 | | | | | | | | | | | | | | | | | | | | | | |
| hsa-miR-127 | hsa-miR-127_st1 | 9.5 | 8.74 | 7.80 | 9.31 | 8.84 | 0.76 | 100 | 7.33 | 6.03 | 8.47 | 8.04 | 8.19 | 6.20 | 7.20 | 6.02 | 5.93 | 7.05 | 1.03 | 56 | 1.02E−02 | 1.79 | 3.5 |
| hsa-asg- | hsa-asg- | 4.7 | 4.96 | 4.22 | 5.62 | 4.88 | 0.58 | 75 | 2.75 | 3.46 | 1.88 | 3.31 | 3.45 | 2.66 | 3.23 | 3.24 | 3.95 | 3.10 | 0.60 | 0 | 4.06E−04 | 1.78 | 3.4 |
| 2485 | 2485_st2 | | | | | | | | | | | | | | | | | | | | | | |
| hsa-asg-10775 | hsa-asg- | 7.1 | 7.28 | 6.49 | 7.35 | 7.06 | 0.39 | 100 | 5.64 | 5.24 | 5.34 | 5.58 | 4.89 | 5.18 | 5.42 | 5.07 | 5.23 | 5.29 | 0.24 | 0 | 5.86E−07 | 1.77 | 3.4 |
| | 10775_st2 | | | | | | | | | | | | | | | | | | | | | | |
| hsa-asg-6642 | hsa-asg-6642_st2 | 5.8 | 6.51 | 5.29 | 6.27 | 5.98 | 0.53 | 25 | 4.58 | 4.34 | 4.93 | 4.42 | 4.28 | 4.08 | 3.52 | 3.53 | 4.30 | 4.22 | 0.46 | 0 | 7.53E−05 | 1.76 | 3.4 |
| hsa-asg- | hsa-asg- | 10.6 | 9.77 | 10.8 | 10.2 | 10.3 | 0.48 | 100 | 9.35 | 9.76 | 7.61 | 8.73 | 9.25 | 9.68 | 7.70 | 8.16 | 7.34 | 8.62 | 0.94 | 100 | 5.09E−03 | 1.76 | 3.4 |
| 5810 | 5810_st2 | | | | | | | | | | | | | | | | | | | | | | |
| hsa-miR- | hsa-asg- | 8.0 | 7.50 | 6.06 | 6.96 | 7.13 | 0.83 | 100 | 5.56 | 5.38 | 6.61 | 6.07 | 5.86 | 4.62 | 4.45 | 4.70 | 5.17 | 5.38 | 0.72 | 11 | 2.65E−03 | 1.75 | 3.4 |
| 376a | 10049_st1 | | | | | | | | | | | | | | | | | | | | | | |
| hsa-miR- | hsa-miR- | 7.4 | 6.91 | 5.85 | 6.44 | 6.65 | 0.67 | 75 | 5.68 | 4.58 | 6.02 | 6.18 | 5.37 | 4.55 | 3.08 | 4.39 | 4.30 | 4.90 | 0.99 | 0 | 8.86E−03 | 1.75 | 3.4 |
| 376a | 376a_st2 | | | | | | | | | | | | | | | | | | | | | | |
| hsa-miR-376a | hsa-asg-14234_st1 | 6.5 | 5.89 | 5.29 | 4.96 | 5.67 | 0.69 | 50 | 3.92 | 4.79 | 3.97 | 4.54 | 5.37 | 4.22 | 3.52 | 4.63 | 2.56 | 4.17 | 0.82 | 0 | 8.65E−03 | 1.50 | 2.8 |
| hsa-asg- | hsa-asg- | 6.4 | 6.59 | 6.70 | 6.56 | 6.57 | 0.10 | 100 | 4.98 | 5.42 | 4.10 | 4.19 | 5.55 | 3.82 | 5.20 | 5.69 | 4.59 | 4.84 | 0.69 | 0 | 4.64E−04 | 1.74 | 3.3 |
| 14048 | 14048_st1 | | | | | | | | | | | | | | | | | | | | | | |
| hsa-miR-18a | hsa-miR-18a_st1 | 7.6 | 9.28 | 6.66 | 7.52 | 7.77 | 1.10 | 100 | 6.30 | 6.48 | 7.62 | 6.48 | 5.05 | 4.66 | 6.29 | 6.20 | 5.40 | 6.05 | 0.89 | 44 | 1.18E−02 | 1.72 | 3.3 |
| hsa-asg- | hsa-asg- | 10.7 | 9.89 | 11.0 | 10.4 | 10.5 | 0.48 | 100 | 9.73 | 9.81 | 7.93 | 9.00 | 9.47 | 9.59 | 8.13 | 8.34 | 7.31 | 8.81 | 0.91 | 100 | 5.03E−03 | 1.71 | 3.3 |
| 6728 | 6728_st2 | | | | | | | | | | | | | | | | | | | | | | |
| hsa-miR- | hsa-miR- | 5.8 | 6.76 | 4.52 | 3.55 | 5.16 | 1.41 | 50 | 5.15 | 3.95 | 3.47 | 3.73 | 4.19 | 3.15 | 2.21 | 2.01 | 3.16 | 3.45 | 0.97 | 0 | 2.61E−02 | 1.71 | 3.3 |
| 19a | 19a_st1 | | | | | | | | | | | | | | | | | | | | | | |
| hsa-asg- | hsa-asg- | 3.2 | 6.85 | 3.05 | 6.07 | 4.81 | 1.94 | 25 | 3.92 | 3.31 | 2.60 | 2.98 | 3.75 | 3.00 | 3.23 | 2.56 | 2.77 | 3.12 | 0.48 | 0 | 2.66E−02 | 1.68 | 3.2 |
| 9253 | 9253_st2 | | | | | | | | | | | | | | | | | | | | | | |
| hsa-asg- | hsa-asg- | 7.6 | 7.61 | 7.23 | 7.23 | 7.43 | 0.23 | 50 | 5.92 | 6.62 | 5.60 | 6.49 | 5.31 | 6.18 | 3.65 | 6.02 | 5.97 | 5.75 | 0.89 | 0 | 3.85E−03 | 1.68 | 3.2 |
| 4015 | 4015_st2 | | | | | | | | | | | | | | | | | | | | | | |
| hsa-asg- | hsa-asg- | 9.0 | 6.02 | 8.50 | 5.54 | 7.29 | 1.77 | 75 | 4.72 | 7.07 | 4.46 | 5.47 | 5.58 | 6.60 | 4.93 | 5.49 | 6.21 | 5.62 | 0.87 | 22 | 3.84E−02 | 1.68 | 3.2 |
| 7439 | 7439_st1 | | | | | | | | | | | | | | | | | | | | | | |
| hsa-asg- | hsa-asg- | 7.4 | 6.89 | 6.28 | 6.58 | 6.81 | 0.51 | 100 | 5.39 | 5.24 | 5.08 | 5.64 | 5.08 | 4.69 | 5.58 | 4.89 | 4.68 | 5.14 | 0.35 | 0 | 2.66E−05 | 1.67 | 3.2 |
| 128 | 128_st2 | | | | | | | | | | | | | | | | | | | | | | |
| hsa-asg- | hsa-asg- | 9.3 | 7.98 | 9.05 | 8.53 | 8.72 | 0.60 | 100 | 8.16 | 8.00 | 5.65 | 7.70 | 7.86 | 8.17 | 6.53 | 6.40 | 5.20 | 7.07 | 1.15 | 67 | 2.16E−02 | 1.65 | 3.1 |
| 12172 | 12172_st2 | | | | | | | | | | | | | | | | | | | | | | |
| hsa-miR-124a | hsa-miR-124a_st1 | 6.6 | 6.02 | 5.51 | 5.89 | 6.03 | 0.49 | 50 | 4.86 | 4.72 | 4.35 | 5.34 | 4.40 | 3.93 | 2.74 | 4.21 | 4.91 | 4.38 | 0.75 | 0 | 2.12E−03 | 1.64 | 3.1 |
| hsa-miR- | hsa- | 6.2 | 5.45 | 4.89 | 6.25 | 5.71 | 0.67 | 25 | 4.14 | 4.34 | 4.35 | 4.99 | 4.24 | 2.83 | 2.91 | 4.01 | 5.34 | 4.13 | 0.83 | 0 | 6.55E−03 | 1.58 | 3.0 |
| 124a | cand79_st1 | | | | | | | | | | | | | | | | | | | | | | |
| hsa-miR- | hsa-miR- | 13.0 | 12.9 | 12.6 | 12.7 | 12.8 | 0.20 | 100 | 11.1 | 11.0 | 11.2 | 11.8 | 11.2 | 10.8 | 11.5 | 11.2 | 11.0 | 11.2 | 0.30 | 100 | 7.30E−07 | 1.64 | 3.1 |
| 422b | 422b_st2 | | | | | | | | | | | | | | | | | | | | | | |
| hsa-asg- | hsa-asg- | 6.0 | 7.05 | 7.17 | 6.48 | 6.69 | 0.51 | 75 | 5.35 | 5.88 | 4.17 | 4.93 | 4.58 | 5.66 | 4.45 | 5.30 | 5.14 | 5.05 | 0.57 | 0 | 4.44E−04 | 1.64 | 3.1 |
| 3614 | 3614_st1 | | | | | | | | | | | | | | | | | | | | | | |
| hsa-asg- | hsa-asg- | 5.6 | 5.37 | 4.52 | 4.49 | 5.01 | 0.60 | 25 | 4.33 | 3.84 | 4.46 | 4.19 | 4.01 | 3.30 | 2.03 | 2.19 | 2.34 | 3.41 | 0.98 | 0 | 1.22E−02 | 1.60 | 3.0 |
| 5617 | 5617_st1 | | | | | | | | | | | | | | | | | | | | | | |
| hsa-asg-3251 | hsa-asg-3251_st1 | 5.3 | 6.35 | 4.63 | 6.60 | 5.72 | 0.92 | 50 | 4.79 | 4.65 | 4.57 | 3.46 | 4.10 | 4.47 | 3.52 | 3.66 | 3.81 | 4.12 | 0.52 | 0 | 1.82E−03 | 1.60 | 3.0 |
| hsa-asg- | hsa-asg- | 3.8 | 7.02 | 2.87 | 5.73 | 4.86 | 1.87 | 25 | 4.03 | 1.76 | 3.81 | 3.80 | 3.63 | 3.44 | 3.65 | 2.74 | 2.56 | 3.27 | 0.75 | 0 | 4.48E−02 | 1.59 | 3.0 |
| 9280 | 9280_st1 | | | | | | | | | | | | | | | | | | | | | | |
| hsa-asg-8902 | hsa-asg-8902_st2 | 7.2 | 6.02 | 7.50 | 6.77 | 6.88 | 0.64 | 75 | 6.82 | 6.24 | 4.80 | 4.80 | 5.64 | 5.59 | 5.15 | 4.80 | 3.88 | 5.30 | 0.88 | 22 | 8.62E−03 | 1.57 | 3.0 |
| hsa-asg- | hsa-asg- | 4.0 | 5.92 | 5.04 | 5.73 | 5.18 | 0.85 | 25 | 3.92 | 4.42 | 3.28 | 2.98 | 3.24 | 4.62 | 2.91 | 4.39 | 2.77 | 3.62 | 0.73 | 0 | 5.87E−03 | 1.56 | 3.0 |
| 11688 | 11688_st1 | | | | | | | | | | | | | | | | | | | | | | |
| hsa-miR-410 | hsa-miR-410_st1 | 5.7 | 4.74 | 4.34 | 4.13 | 4.74 | 0.71 | 25 | 3.10 | 3.00 | 2.12 | 4.28 | 3.17 | 3.44 | 3.77 | 2.56 | 3.16 | 3.18 | 0.63 | 0 | 2.20E−03 | 1.56 | 2.9 |
| hsa-asg- | hsa-asg- | 7.9 | 7.74 | 7.60 | 7.63 | 7.72 | 0.14 | 100 | 6.12 | 6.18 | 6.20 | 7.25 | 6.21 | 5.79 | 5.86 | 5.53 | 6.58 | 6.19 | 0.50 | 56 | 9.79E−05 | 1.53 | 2.9 |
| 7471 | 7471_st1 | | | | | | | | | | | | | | | | | | | | | | |
| hsa-asg- | hsa-asg- | 6.8 | 5.92 | 4.68 | 6.13 | 5.90 | 0.91 | 75 | 5.04 | 4.25 | 4.46 | 4.28 | 4.36 | 4.22 | 4.81 | 4.39 | 3.51 | 4.37 | 0.42 | 0 | 1.32E−03 | 1.53 | 2.9 |
| 1301 | 1301_st1 | | | | | | | | | | | | | | | | | | | | | | |
| hsa-asg- | hsa-asg- | 8.1 | 7.42 | 8.45 | 7.64 | 7.91 | 0.46 | 100 | 6.39 | 7.00 | 5.31 | 6.72 | 6.61 | 7.40 | 5.51 | 6.45 | 6.14 | 6.39 | 0.67 | 33 | 1.82E−03 | 1.51 | 2.9 |
| 9053 | 9053_st1 | | | | | | | | | | | | | | | | | | | | | | |
| hsa-miR- | hsa-miR- | 7.1 | 5.81 | 7.14 | 7.28 | 6.85 | 0.70 | 75 | 5.09 | 5.89 | 6.45 | 6.04 | 6.28 | 6.16 | 4.09 | 4.83 | 3.35 | 5.35 | 1.09 | 22 | 2.90E−02 | 1.50 | 2.8 |
| 432 | 432_st2 | | | | | | | | | | | | | | | | | | | | | | |
| hsa- | hsa- | 9.0 | 8.42 | 9.58 | 8.66 | 8.92 | 0.50 | 100 | 7.96 | 8.53 | 6.18 | 7.45 | 7.89 | 8.52 | 6.51 | 7.08 | 6.74 | 7.43 | 0.86 | 89 | 8.60E−03 | 1.49 | 2.8 |
| cand545 | cand545_st1 | | | | | | | | | | | | | | | | | | | | | | |
| hsa-miR-18b | hsa-miR-18b_st1 | 7.5 | 8.89 | 6.52 | 7.40 | 7.58 | 0.98 | 100 | 6.70 | 6.07 | 7.22 | 6.52 | 5.60 | 5.18 | 6.32 | 5.41 | 6.09 | 6.12 | 0.65 | 44 | 8.30E−03 | 1.46 | 2.8 |
| hsa-asg- | hsa-asg- | 6.0 | 4.70 | 4.31 | 4.90 | 5.00 | 0.76 | 25 | 4.14 | 3.46 | 3.47 | 4.86 | 3.96 | 3.30 | 2.39 | 2.19 | 4.19 | 3.55 | 0.86 | 0 | 1.48E−02 | 1.45 | 2.7 |
| 3910 | 3910_st2 | | | | | | | | | | | | | | | | | | | | | | |
| hsa-asg- | hsa-asg- | 9.7 | 9.76 | 10.1 | 9.83 | 9.88 | 0.20 | 50 | 9.37 | 9.77 | 7.69 | 8.42 | 8.87 | 9.33 | 7.52 | 7.95 | 7.10 | 8.45 | 0.94 | 22 | 1.33E−02 | 1.43 | 2.7 |
| 1751 | 1751_st2 | | | | | | | | | | | | | | | | | | | | | | |
| hsa-asg- | hsa-asg- | 9.6 | 9.30 | 9.84 | 9.69 | 9.61 | 0.23 | 0 | 8.93 | 9.21 | 6.75 | 8.01 | 8.64 | 9.38 | 6.92 | 8.06 | 7.80 | 8.19 | 0.94 | 11 | 1.37E−02 | 1.43 | 2.7 |
| 4869 | 4869_st1 | | | | | | | | | | | | | | | | | | | | | | |
| hsa-asg-67 | hsa-asg-67_st2 | 5.3 | 5.77 | 4.00 | 6.99 | 5.53 | 1.23 | 75 | 5.09 | 3.84 | 4.57 | 2.98 | 3.80 | 4.13 | 4.28 | 4.11 | 4.19 | 4.11 | 0.58 | 0 | 1.38E−02 | 1.42 | 2.7 |
| hsa-asg- | hsa-asg- | 10.5 | 9.96 | 10.6 | 9.92 | 10.2 | 0.39 | 100 | 9.45 | 9.92 | 7.79 | 9.19 | 9.80 | 9.64 | 8.28 | 8.36 | 7.33 | 8.86 | 0.94 | 100 | 1.64E−02 | 1.41 | 2.7 |
| 388 | 388_st1 | | | | | | | | | | | | | | | | | | | | | | |
| hsa-miR- | hsa-miR- | 8.2 | 6.96 | 8.29 | 7.84 | 7.83 | 0.62 | 100 | 7.24 | 6.62 | 5.65 | 6.34 | 6.64 | 6.63 | 6.17 | 6.57 | 5.93 | 6.42 | 0.47 | 56 | 7.79E−04 | 1.41 | 2.7 |
| 566 | 566_st1 | | | | | | | | | | | | | | | | | | | | | | |
| hsa-asg- | hsa-asg- | 6.7 | 5.09 | 6.26 | 5.66 | 5.93 | 0.71 | 50 | 4.14 | 4.06 | 2.36 | 5.75 | 5.00 | 4.76 | 4.87 | 4.76 | 5.05 | 4.53 | 0.95 | 0 | 2.40E−02 | 1.41 | 2.7 |
| 2027 | 2027_st1 | | | | | | | | | | | | | | | | | | | | | | |
| hsa-miR-96 | hsa-miR-96_st1 | 5.2 | 5.77 | 4.15 | 5.89 | 5.26 | 0.80 | 25 | 5.52 | 3.95 | 3.65 | 3.60 | 4.65 | 3.44 | 3.65 | 2.56 | 3.67 | 3.85 | 0.83 | 11 | 1.55E−02 | 1.41 | 2.6 |
| hsa-asg- | hsa-asg- | 11.1 | 10.9 | 11.5 | 12.2 | 11.4 | 0.57 | 100 | 10.4 | 10.9 | 9.42 | 9.81 | 10.4 | 10.9 | 9.24 | 9.87 | 9.15 | 10.0 | 0.70 | 100 | 4.80E−03 | 1.40 | 2.6 |
| 9078 | 9078_st2 | | | | | | | | | | | | | | | | | | | | | | |
| hsa-asg- | hsa-asg- | 9.1 | 9.05 | 9.38 | 9.36 | 9.25 | 0.16 | 100 | 8.97 | 8.76 | 6.70 | 8.31 | 8.74 | 8.71 | 7.10 | 7.37 | 5.97 | 7.85 | 1.09 | 89 | 2.97E−02 | 1.40 | 2.6 |
| 5423 | 5423_st2 | | | | | | | | | | | | | | | | | | | | | | |
| hsa-asg- | hsa-asg- | 5.6 | 5.15 | 5.00 | 6.18 | 5.49 | 0.53 | 50 | 4.58 | 3.84 | 4.93 | 4.76 | 4.32 | 3.70 | 3.23 | 3.53 | 4.07 | 4.11 | 0.58 | 0 | 1.97E−03 | 1.38 | 2.6 |
| 1221 | 1221_st2 | | | | | | | | | | | | | | | | | | | | | | |
| hsa-asg- | hsa-asg- | 8.3 | 7.41 | 8.21 | 7.76 | 7.93 | 0.43 | 100 | 7.28 | 7.85 | 5.49 | 6.82 | 7.44 | 7.25 | 6.12 | 5.43 | 5.32 | 6.55 | 0.98 | 56 | 2.27E−02 | 1.38 | 2.6 |
| 4116_st2 | 4116_st2 | | | | | | | | | | | | | | | | | | | | | | |
| hsa-asg- | hsa-asg- | 10.1 | 10.0 | 10.3 | 10.1 | 10.1 | 0.16 | 100 | 9.52 | 9.94 | 7.67 | 8.96 | 9.51 | 9.77 | 8.30 | 8.24 | 7.24 | 8.79 | 0.97 | 33 | 1.92E−02 | 1.37 | 2.6 |
| 5379 | 5379_st2 | | | | | | | | | | | | | | | | | | | | | | |
| hsa-asg- | hsa-asg- | 8.5 | 8.08 | 8.97 | 8.39 | 8.48 | 0.37 | 100 | 7.65 | 8.28 | 6.07 | 6.86 | 7.71 | 7.86 | 6.29 | 6.95 | 6.37 | 7.12 | 0.79 | 89 | 7.59E−03 | 1.37 | 2.6 |
| 11521 | 11521_st1 | | | | | | | | | | | | | | | | | | | | | | |
| hsa-asg- | hsa-asg- | 9.3 | 9.37 | 9.50 | 9.11 | 9.34 | 0.16 | 100 | 8.79 | 8.62 | 6.92 | 8.26 | 8.22 | 8.17 | 7.34 | 8.26 | 7.19 | 7.97 | 0.66 | 100 | 2.12E−03 | 1.36 | 2.6 |
| 12925 | 12925_st1 | | | | | | | | | | | | | | | | | | | | | | |
| hsa-miR-369-5p | hsa-miR-369- | 6.1 | 6.02 | 4.08 | 5.23 | 5.38 | 0.97 | 50 | 4.14 | 3.31 | 5.01 | 4.90 | 4.89 | 3.15 | 3.52 | 3.24 | 4.07 | 4.03 | 0.76 | 0 | 1.91E−02 | 1.36 | 2.6 |
| | 5p_st2 | | | | | | | | | | | | | | | | | | | | | | |
| hsa-miR- | hsa-miR- | 9.1 | 8.68 | 7.60 | 8.47 | 8.46 | 0.63 | 100 | 7.04 | 6.87 | 7.63 | 7.47 | 7.54 | 7.07 | 6.96 | 6.67 | 6.71 | 7.11 | 0.36 | 100 | 3.95E−04 | 1.35 | 2.6 |
| 379 | 379_st1 | | | | | | | | | | | | | | | | | | | | | | |
| hsa- | hsa- | 10.4 | 10.3 | 10.9 | 10.3 | 10.5 | 0.29 | 100 | 10.0 | 10.0 | 8.14 | 9.43 | 9.78 | 9.92 | 8.31 | 8.96 | 7.78 | 9.16 | 0.89 | 44 | 1.40E−02 | 1.35 | 2.6 |
| cand711 | cand711_st1 | | | | | | | | | | | | | | | | | | | | | | |
| hsa-miR- | hsa-miR- | 10.1 | 10.2 | 9.64 | 10.6 | 10.1 | 0.43 | 100 | 10.2 | 9.01 | 8.85 | 8.85 | 9.08 | 8.55 | 8.63 | 8.96 | 7.36 | 8.84 | 0.74 | 89 | 6.41E−03 | 1.34 | 2.5 |
| 132 | 132_st1 | | | | | | | | | | | | | | | | | | | | | | |
| hsa-asg- | hsa-asg- | 7.0 | 5.32 | 5.45 | 5.66 | 5.86 | 0.79 | 25 | 5.04 | 3.95 | 5.40 | 5.47 | 4.65 | 4.69 | 4.19 | 2.74 | 4.59 | 4.52 | 0.84 | 0 | 2.06E−02 | 1.34 | 2.5 |
| 13166 | 13166_st2 | | | | | | | | | | | | | | | | | | | | | | |
| hsa-asg- | hsa-asg- | 11.4 | 11.0 | 12.0 | 11.6 | 11.5 | 0.40 | 100 | 11.0 | 11.1 | 9.12 | 10.5 | 10.9 | 10.9 | 9.67 | 10.0 | 8.53 | 10.22 | 0.94 | 89 | 2.13E−02 | 1.33 | 2.5 |
| 6234 | 6234_st1 | | | | | | | | | | | | | | | | | | | | | | |
| hsa-miR-183 | hsa-miR-183_st1 | 8.2 | 8.87 | 8.83 | 9.33 | 8.82 | 0.45 | 100 | 8.17 | 7.21 | 7.22 | 8.43 | 8.06 | 6.32 | 8.13 | 6.85 | 7.13 | 7.50 | 0.72 | 89 | 6.81E−03 | 1.31 | 2.5 |
| hsa-asg- | hsa-asg- | 5.6 | 5.89 | 5.39 | 6.10 | 5.76 | 0.30 | 50 | 4.92 | 4.50 | 4.23 | 4.46 | 4.48 | 5.00 | 3.99 | 4.21 | 4.40 | 4.47 | 0.32 | 0 | 2.99E−05 | 1.30 | 2.5 |
| 10830 | 10830_st2 | | | | | | | | | | | | | | | | | | | | | | |
| hsa-asg- | hsa-asg- | 8.3 | 6.65 | 9.14 | 8.34 | 8.11 | 1.05 | 100 | 7.48 | 7.62 | 6.26 | 6.77 | 7.18 | 7.00 | 6.14 | 7.10 | 5.84 | 6.82 | 0.62 | 67 | 1.64E−02 | 1.29 | 2.4 |
| 5326 | 5326_st2 | | | | | | | | | | | | | | | | | | | | | | |
| hsa-asg- | hsa-asg- | 11.3 | 11.4 | 11.9 | 11.1 | 11.4 | 0.36 | 100 | 10.8 | 10.9 | 9.49 | 10.2 | 10.7 | 10.8 | 9.68 | 9.81 | 8.83 | 10.16 | 0.75 | 100 | 8.13E−03 | 1.29 | 2.4 |
| 7096 | 7096_st2 | | | | | | | | | | | | | | | | | | | | | | |
| hsa-asg- | hsa-asg- | 9.6 | 7.78 | 9.24 | 7.87 | 8.64 | 0.95 | 100 | 7.87 | 8.13 | 6.25 | 6.87 | 7.60 | 7.81 | 6.96 | 7.87 | 7.06 | 7.38 | 0.62 | 89 | 1.49E−02 | 1.26 | 2.4 |
| 7070 | 7070_st1 | | | | | | | | | | | | | | | | | | | | | | |
| hsa-asg- | hsa-asg- | 7.2 | 7.08 | 7.88 | 6.64 | 7.21 | 0.51 | 100 | 6.12 | 6.47 | 5.74 | 5.65 | 6.08 | 5.98 | 5.38 | 5.87 | 6.29 | 5.95 | 0.33 | 11 | 2.29E−04 | 1.26 | 2.4 |
| 1689 | 1689_st2 | | | | | | | | | | | | | | | | | | | | | | |
| hsa-asg- | hsa-asg- | 6.5 | 5.09 | 6.56 | 5.13 | 5.84 | 0.85 | 25 | 4.79 | 5.64 | 2.48 | 4.42 | 4.78 | 5.20 | 4.74 | 4.66 | 4.63 | 4.59 | 0.87 | 0 | 3.50E−02 | 1.25 | 2.4 |
| 7226 | 7226_st1 | | | | | | | | | | | | | | | | | | | | | | |
| hsa-asg- | hsa-asg- | 5.8 | 4.89 | 4.22 | 4.40 | 4.84 | 0.73 | 25 | 4.33 | 3.46 | 3.28 | 3.97 | 4.06 | 3.44 | 3.52 | 3.53 | 2.77 | 3.59 | 0.47 | 0 | 3.11E−03 | 1.24 | 2.4 |
| 12690 | 12690_st1 | | | | | | | | | | | | | | | | | | | | | | |
| hsa-asg-53 | hsa-asg- | 10.3 | 10.6 | 11.1 | 10.3 | 10.6 | 0.38 | 100 | 10.0 | 9.85 | 8.64 | 9.44 | 10.1 | 10.0 | 8.86 | 9.06 | 8.13 | 9.36 | 0.73 | 100 | 9.12E−03 | 1.24 | 2.4 |
| | 53_st2 | | | | | | | | | | | | | | | | | | | | | | |
| hsa-asg- | hsa-asg- | 7.3 | 7.05 | 7.38 | 7.05 | 7.20 | 0.18 | 75 | 6.89 | 6.93 | 5.25 | 6.55 | 6.45 | 6.53 | 5.15 | 5.15 | 4.87 | 5.97 | 0.85 | 22 | 1.71E−02 | 1.23 | 2.3 |
| 1153 | 1153_st1 | | | | | | | | | | | | | | | | | | | | | | |
| hsa-asg- | hsa-asg- | 11.0 | 10.8 | 11.7 | 10.8 | 11.0 | 0.42 | 100 | 10.5 | 10.5 | 8.59 | 9.98 | 10.7 | 10.6 | 9.33 | 9.90 | 8.62 | 9.87 | 0.84 | 89 | 2.05E−02 | 1.22 | 2.3 |
| 12136 | 12136_st2 | | | | | | | | | | | | | | | | | | | | | | |
| hsa-asg- | hsa-asg- | 10.9 | 10.3 | 11.2 | 10.5 | 10.7 | 0.42 | 100 | 9.98 | 10.4 | 8.69 | 9.59 | 10.3 | 10.2 | 8.86 | 9.42 | 8.38 | 9.55 | 0.77 | 67 | 1.35E−02 | 1.22 | 2.3 |
| 12289 | 12289_st1 | | | | | | | | | | | | | | | | | | | | | | |
| hsa-asg- | hsa-asg- | 7.6 | 6.66 | 7.51 | 7.25 | 7.27 | 0.44 | 75 | 6.15 | 6.88 | 4.97 | 6.26 | 6.54 | 7.18 | 4.93 | 6.11 | 5.52 | 6.06 | 0.79 | 11 | 1.65E−02 | 1.21 | 2.3 |
| 1898 | 1898_st1 | | | | | | | | | | | | | | | | | | | | | | |
| hsa-asg- | hsa-asg- | 6.2 | 5.97 | 5.29 | 6.08 | 5.89 | 0.41 | 25 | 5.30 | 4.50 | 4.10 | 4.86 | 5.15 | 4.35 | 4.99 | 4.30 | 4.59 | 4.68 | 0.41 | 0 | 4.85E−04 | 1.21 | 2.3 |
| 10336 | 10336_st1 | | | | | | | | | | | | | | | | | | | | | | |
| hsa-miR-137 | hsa-miR-137_st1 | 6.0 | 3.95 | 4.28 | 3.81 | 4.53 | 1.06 | 25 | 3.26 | 3.00 | 3.97 | 2.62 | 3.02 | 3.93 | 2.74 | 3.90 | 3.51 | 3.33 | 0.52 | 0 | 1.65E−02 | 1.21 | 2.3 |
| hsa-asg- | hsa-asg- | 11.1 | 10.5 | 11.4 | 10.8 | 11.0 | 0.37 | 100 | 10.7 | 10.6 | 9.11 | 9.71 | 10.1 | 10.4 | 9.08 | 9.60 | 8.63 | 9.80 | 0.76 | 89 | 1.30E−02 | 1.20 | 2.3 |
| 11514 | 11514_st1 | | | | | | | | | | | | | | | | | | | | | | |
| hsa-asg- | hsa-asg- | 9.4 | 9.51 | 9.72 | 9.67 | 9.59 | 0.12 | 100 | 9.15 | 9.69 | 7.02 | 8.67 | 9.00 | 9.31 | 7.70 | 7.86 | 7.14 | 8.39 | 0.99 | 100 | 3.75E−02 | 1.20 | 2.3 |
| 5189 | 5189_st2 | | | | | | | | | | | | | | | | | | | | | | |
| hsa-asg- | hsa-asg- | 5.9 | 6.18 | 5.19 | 5.69 | 5.75 | 0.42 | 50 | 4.72 | 3.95 | 4.46 | 6.07 | 5.10 | 4.69 | 3.38 | 3.53 | 5.05 | 4.55 | 0.84 | 0 | 2.26E−02 | 1.20 | 2.3 |
| 8380 | 8380_st2 | | | | | | | | | | | | | | | | | | | | | | |
| hsa-asg- | hsa-asg- | 8.0 | 7.48 | 8.20 | 7.81 | 7.87 | 0.31 | 100 | 6.92 | 7.90 | 6.04 | 6.68 | 6.50 | 7.31 | 6.29 | 6.42 | 6.10 | 6.68 | 0.60 | 56 | 3.71E−03 | 1.19 | 2.3 |
| 3150 | 3150_st1 | | | | | | | | | | | | | | | | | | | | | | |
| hsa- | hsa- | 7.5 | 7.67 | 7.63 | 8.44 | 7.82 | 0.42 | 100 | 6.59 | 7.38 | 6.43 | 6.01 | 6.51 | 6.94 | 6.36 | 6.72 | 6.78 | 6.64 | 0.39 | 33 | 4.19E−04 | 1.18 | 2.3 |
| miR203 | miR203_st1 | | | | | | | | | | | | | | | | | | | | | | |
| hsa-asg-511 | hsa-asg-511_st1 | 6.4 | 7.15 | 5.48 | 6.43 | 6.37 | 0.68 | 75 | 5.78 | 4.72 | 5.94 | 5.21 | 4.58 | 4.91 | 5.66 | 5.36 | 4.59 | 5.20 | 0.52 | 0 | 5.81E−03 | 1.17 | 2.3 |
| hsa-asg- | hsa-asg- | 11.2 | 10.9 | 11.5 | 11.4 | 11.2 | 0.24 | 100 | 11.1 | 10.6 | 9.55 | 10.1 | 10.7 | 10.7 | 9.58 | 9.90 | 8.65 | 10.1 | 0.78 | 100 | 1.51E−02 | 1.17 | 2.2 |
| 6398 | 6398_st2 | | | | | | | | | | | | | | | | | | | | | | |
| hsa-asg- | hsa-asg- | 7.8 | 7.88 | 7.58 | 7.91 | 7.81 | 0.15 | 100 | 7.37 | 7.65 | 5.90 | 7.03 | 7.42 | 7.58 | 5.80 | 5.49 | 5.59 | 6.65 | 0.93 | 56 | 3.33E−02 | 1.16 | 2.2 |
| 1375 | 1375_st1 | | | | | | | | | | | | | | | | | | | | | | |
| hsa-asg- | hsa-asg- | 10.9 | 10.5 | 11.4 | 11.0 | 11.0 | 0.35 | 100 | 10.6 | 10.6 | 9.48 | 9.73 | 10.3 | 10.4 | 9.25 | 9.85 | 8.36 | 9.87 | 0.76 | 89 | 1.68E−02 | 1.15 | 2.2 |
| 9092 | 9092_st2 | | | | | | | | | | | | | | | | | | | | | | |
| hsa-asg- | hsa-asg- | 7.2 | 6.45 | 8.29 | 7.22 | 7.30 | 0.76 | 100 | 6.64 | 6.80 | 6.07 | 5.58 | 6.48 | 6.85 | 5.76 | 5.63 | 5.61 | 6.16 | 0.54 | 33 | 9.22E−03 | 1.15 | 2.2 |
| 5735 | 5735_st2 | | | | | | | | | | | | | | | | | | | | | | |
| hsa-miR- | hsa-miR- | 8.9 | 7.40 | 8.45 | 8.74 | 8.38 | 0.68 | 100 | 7.69 | 7.30 | 7.86 | 7.63 | 7.93 | 7.04 | 6.90 | 6.46 | 6.30 | 7.23 | 0.60 | 78 | 1.10E−02 | 1.14 | 2.2 |
| 382 | 382_st1 | | | | | | | | | | | | | | | | | | | | | | |
| hsa-asg- | hsa-asg- | 9.1 | 8.86 | 9.19 | 8.77 | 8.99 | 0.21 | 100 | 8.59 | 8.83 | 6.61 | 8.28 | 8.59 | 8.30 | 7.23 | 7.30 | 6.89 | 7.85 | 0.83 | 44 | 2.28E−02 | 1.14 | 2.2 |
| 9920 | 9920_st1 | | | | | | | | | | | | | | | | | | | | | | |
| hsa-asg- | hsa-asg- | 10.0 | 9.50 | 10.3 | 9.81 | 9.93 | 0.37 | 100 | 9.61 | 9.60 | 7.78 | 8.55 | 9.30 | 9.63 | 7.84 | 8.83 | 7.98 | 8.79 | 0.78 | 100 | 1.97E−02 | 1.14 | 2.2 |
| 9266 | 9266_st1 | | | | | | | | | | | | | | | | | | | | | | |
| hsa-asg- | hsa-asg- | 8.7 | 7.92 | 8.34 | 8.00 | 8.25 | 0.37 | 100 | 6.62 | 7.76 | 6.46 | 6.43 | 7.41 | 7.60 | 6.71 | 7.50 | 7.46 | 7.11 | 0.54 | 67 | 2.83E−03 | 1.14 | 2.2 |
| 14051 | 14051_st2 | | | | | | | | | | | | | | | | | | | | | | |
| hsa-miR- | hsa- | 5.1 | 5.52 | 3.48 | 5.58 | 4.94 | 0.99 | 25 | 4.03 | 3.16 | 4.23 | 4.69 | 4.28 | 3.44 | 4.19 | 2.37 | 3.81 | 3.80 | 0.71 | 0 | 3.59E−02 | 1.14 | 2.2 |
| 135b | cand78_st1 | | | | | | | | | | | | | | | | | | | | | | |
| hsa-asg- | hsa-asg- | 8.2 | 7.67 | 8.90 | 8.01 | 8.20 | 0.52 | 100 | 7.76 | 7.99 | 6.00 | 6.97 | 7.55 | 7.49 | 6.32 | 6.92 | 6.61 | 7.07 | 0.68 | 67 | 1.36E−02 | 1.13 | 2.2 |
| 11847 | 11847_st1 | | | | | | | | | | | | | | | | | | | | | | |
| hsa-asg- | hsa-asg- | 9.9 | 9.59 | 10.5 | 10.0 | 10.0 | 0.39 | 100 | 9.74 | 9.60 | 8.04 | 8.99 | 9.65 | 9.73 | 8.44 | 8.70 | 7.46 | 8.93 | 0.83 | 22 | 2.77E−02 | 1.12 | 2.2 |
| 4654 | 4654_st1 | | | | | | | | | | | | | | | | | | | | | | |
| hsa-miR- | hsa-miR- | 12.8 | 12.8 | 12.1 | 13.0 | 12.7 | 0.40 | 100 | 12.5 | 11.4 | 11.7 | 12.2 | 11.8 | 11.0 | 11.8 | 10.5 | 11.3 | 11.6 | 0.61 | 100 | 7.08E−03 | 1.12 | 2.2 |
| 10a | 10a_st1 | | | | | | | | | | | | | | | | | | | | | | |
| hsa-asg- | hsa-asg- | 8.2 | 8.81 | 8.78 | 8.44 | 8.57 | 0.27 | 50 | 8.25 | 8.36 | 6.36 | 7.73 | 8.16 | 8.44 | 6.54 | 7.19 | 6.06 | 7.45 | 0.94 | 33 | 4.29E−02 | 1.12 | 2.2 |
| 3933 | 3933_st1 | | | | | | | | | | | | | | | | | | | | | | |
| hsa-asg- | hsa-asg- | 8.7 | 9.55 | 9.20 | 8.89 | 9.10 | 0.35 | 25 | 9.04 | 8.75 | 7.14 | 8.21 | 8.51 | 8.90 | 7.48 | 7.62 | 6.18 | 7.98 | 0.95 | 0 | 4.66E−02 | 1.12 | 2.2 |
| 4903 | 4903_st2 | | | | | | | | | | | | | | | | | | | | | | |
| hsa- | hsa- | 8.0 | 7.13 | 7.97 | 7.72 | 7.73 | 0.43 | 100 | 7.27 | 7.72 | 6.43 | 6.17 | 6.74 | 6.77 | 5.66 | 6.66 | 6.07 | 6.61 | 0.63 | 56 | 8.35E−03 | 1.12 | 2.2 |
| cand173 | cand173_st1 | | | | | | | | | | | | | | | | | | | | | | |
| hsa-asg-8872 | hsa-asg-8872_st1 | 9.0 | 7.90 | 9.14 | 9.22 | 8.82 | 0.62 | 100 | 8.38 | 8.46 | 7.42 | 7.49 | 7.92 | 8.36 | 6.83 | 7.60 | 6.84 | 7.70 | 0.63 | 89 | 1.27E−02 | 1.12 | 2.2 |
| hsa-asg- | hsa-asg- | 9.9 | 9.55 | 10.1 | 9.91 | 9.89 | 0.26 | 75 | 9.44 | 9.64 | 7.85 | 8.54 | 8.88 | 9.58 | 8.12 | 8.76 | 8.20 | 8.78 | 0.66 | 11 | 8.89E−03 | 1.11 | 2.2 |
| 11714 | 11714_st2 | | | | | | | | | | | | | | | | | | | | | | |
| hsa-asg- | hsa-asg- | 5.6 | 6.22 | 5.47 | 5.76 | 5.77 | 0.33 | 25 | 4.79 | 4.58 | 5.01 | 4.80 | 4.62 | 4.13 | 5.38 | 4.21 | 4.40 | 4.66 | 0.39 | 0 | 4.72E−04 | 1.11 | 2.2 |
| 5877 | 5877_st1 | | | | | | | | | | | | | | | | | | | | | | |
| hsa-asg- | hsa-asg- | 11.3 | 10.8 | 10.4 | 11.4 | 11.0 | 0.44 | 100 | 11.0 | 9.91 | 10.1 | 10.3 | 9.67 | 9.11 | 10.1 | 9.49 | 9.59 | 9.93 | 0.57 | 100 | 5.79E−03 | 1.11 | 2.2 |
| 13308 | 13308_st2 | | | | | | | | | | | | | | | | | | | | | | |
| hsa-asg- | hsa-asg- | 7.2 | 6.52 | 7.03 | 7.24 | 7.00 | 0.34 | 100 | 6.01 | 6.44 | 5.04 | 5.83 | 6.25 | 6.60 | 5.55 | 5.74 | 5.74 | 5.91 | 0.48 | 22 | 1.77E−03 | 1.09 | 2.1 |
| 6618 | 6618_st2 | | | | | | | | | | | | | | | | | | | | | | |
| hsa-asg- | hsa-asg- | 8.4 | 7.02 | 7.77 | 6.66 | 7.47 | 0.79 | 75 | 7.14 | 7.24 | 5.01 | 6.02 | 6.14 | 6.65 | 5.66 | 7.09 | 6.51 | 6.38 | 0.75 | 44 | 3.67E−02 | 1.09 | 2.1 |
| 9574 | 9574_st2 | | | | | | | | | | | | | | | | | | | | | | |
| hsa-asg- | hsa-asg- | 10.1 | 9.48 | 10.5 | 10.1 | 10.0 | 0.45 | 100 | 9.75 | 9.83 | 8.00 | 9.41 | 9.73 | 9.65 | 8.36 | 8.68 | 7.56 | 9.00 | 0.86 | 100 | 4.06E−02 | 1.08 | 2.1 |
| 11112 | 11112_st2 | | | | | | | | | | | | | | | | | | | | | | |
| hsa-asg-809 | hsa-asg-809_st2 | 7.6 | 6.62 | 7.57 | 7.22 | 7.26 | 0.46 | 100 | 6.75 | 6.72 | 5.67 | 6.74 | 6.65 | 6.63 | 5.24 | 6.17 | 5.05 | 6.18 | 0.69 | 56 | 1.64E−02 | 1.08 | 2.1 |
| hsa-asg- | hsa-asg- | 6.4 | 6.78 | 5.89 | 6.10 | 6.31 | 0.39 | 100 | 5.71 | 5.33 | 5.08 | 5.34 | 6.46 | 4.94 | 4.53 | 4.89 | 4.83 | 5.23 | 0.57 | 22 | 6.20E−03 | 1.08 | 2.1 |
| 2967 | 2967_st2 | | | | | | | | | | | | | | | | | | | | | | |
| hsa-asg-6068 | hsa-asg- | 7.0 | 6.79 | 6.68 | 6.96 | 6.86 | 0.16 | 100 | 6.32 | 6.37 | 5.46 | 5.77 | 6.61 | 6.52 | 4.74 | 5.45 | 4.83 | 5.79 | 0.71 | 33 | 1.40E−02 | 1.08 | 2.1 |
| | 6068_st2 | | | | | | | | | | | | | | | | | | | | | | |
| hsa-asg- | hsa-asg- | 8.2 | 7.85 | 8.33 | 8.44 | 8.21 | 0.26 | 100 | 7.68 | 8.46 | 5.87 | 7.35 | 7.35 | 7.88 | 6.66 | 6.21 | 6.72 | 7.13 | 0.83 | 67 | 3.06E−02 | 1.07 | 2.1 |
| 3230 | 3230_st1 | | | | | | | | | | | | | | | | | | | | | | |
| hsa-asg- | hsa-asg- | 10.1 | 8.30 | 10.1 | 9.73 | 9.58 | 0.87 | 100 | 9.25 | 9.17 | 7.88 | 8.10 | 8.93 | 8.83 | 7.75 | 8.24 | 8.43 | 8.51 | 0.56 | 100 | 2.06E−02 | 1.07 | 2.1 |
| 5032 | 5032_st2 | | | | | | | | | | | | | | | | | | | | | | |
| hsa-miR-450 | hsa-asg- | 5.0 | 5.42 | 3.48 | 4.03 | 4.50 | 0.90 | 25 | 4.14 | 2.83 | 3.07 | 3.60 | 3.17 | 3.70 | 3.52 | 3.53 | 3.35 | 3.43 | 0.39 | 0 | 1.02E−02 | 1.07 | 2.1 |
| | 14228_st2 | | | | | | | | | | | | | | | | | | | | | | |
| hsa-asg-960 | hsa-asg-960_st1 | 9.3 | 9.25 | 9.78 | 9.19 | 9.39 | 0.27 | 100 | 8.88 | 9.40 | 6.85 | 8.60 | 8.90 | 9.05 | 7.65 | 7.96 | 7.66 | 8.33 | 0.84 | 100 | 3.31E−02 | 1.06 | 2.1 |
| hsa- | hsa- | 3.9 | 6.47 | 4.15 | 5.73 | 5.07 | 1.23 | 25 | 4.41 | 4.16 | 4.23 | 4.46 | 4.28 | 3.30 | 4.45 | 3.08 | 3.81 | 4.02 | 0.51 | 0 | 4.51E−02 | 1.05 | 2.1 |
| cand581 | cand581_st1 | | | | | | | | | | | | | | | | | | | | | | |
| hsa-asg- | hsa-asg- | 10.1 | 8.96 | 10.3 | 9.98 | 9.84 | 0.61 | 100 | 8.99 | 9.90 | 8.06 | 8.77 | 9.12 | 9.87 | 7.78 | 8.47 | 8.23 | 8.80 | 0.75 | 100 | 3.30E−02 | 1.05 | 2.1 |
| 2615 | 2615_st2 | | | | | | | | | | | | | | | | | | | | | | |
| hsa-asg- | hsa-asg- | 9.0 | 8.87 | 9.20 | 9.24 | 9.10 | 0.17 | 100 | 9.01 | 8.97 | 7.13 | 8.03 | 8.83 | 8.64 | 7.35 | 7.35 | 7.19 | 8.05 | 0.81 | 100 | 3.05E−02 | 1.04 | 2.1 |
| 6948 | 6948_st2 | | | | | | | | | | | | | | | | | | | | | | |
| hsa-asg- | hsa-asg- | 11.4 | 11.0 | 10.4 | 11.4 | 11.1 | 0.47 | 100 | 11.1 | 9.92 | 10.2 | 10.6 | 9.89 | 9.29 | 10.1 | 9.60 | 9.63 | 10.0 | 0.57 | 100 | 8.58E−03 | 1.04 | 2.1 |
| 5304 | 5304_st1 | | | | | | | | | | | | | | | | | | | | | | |
| hsa-miR- | hsa-miR-30e- | 11.3 | 11.7 | 9.97 | 11.3 | 11.1 | 0.79 | 100 | 10.9 | 10.0 | 10.2 | 11.0 | 10.3 | 9.70 | 9.84 | 8.67 | 9.98 | 10.0 | 0.69 | 100 | 3.57E−02 | 1.04 | 2.1 |
| 30e-5p | 5p_st2 | | | | | | | | | | | | | | | | | | | | | | |
| hsa-asg- | hsa-asg- | 10.9 | 10.5 | 11.5 | 10.8 | 10.9 | 0.44 | 100 | 10.6 | 10.7 | 9.04 | 9.81 | 10.6 | 10.6 | 9.28 | 10.0 | 8.64 | 9.94 | 0.80 | 100 | 3.53E−02 | 1.03 | 2.0 |
| 2906 | 2906_st2 | | | | | | | | | | | | | | | | | | | | | | |
| hsa-asg- | hsa-asg- | 12.1 | 12.4 | 12.7 | 12.0 | 12.3 | 0.30 | 100 | 11.8 | 11.8 | 10.6 | 11.3 | 12.0 | 11.7 | 11.0 | 11.3 | 10.0 | 11.3 | 0.66 | 100 | 1.40E−02 | 1.03 | 2.0 |
| 7175 | 7175_st1 | | | | | | | | | | | | | | | | | | | | | | |
| hsa-asg- | hsa-asg- | 10.6 | 9.37 | 10.3 | 9.56 | 9.98 | 0.61 | 100 | 9.08 | 9.85 | 8.18 | 9.01 | 9.67 | 9.31 | 8.33 | 8.87 | 8.33 | 8.96 | 0.60 | 100 | 1.62E−02 | 1.02 | 2.0 |
| 8254 | 8254_st2 | | | | | | | | | | | | | | | | | | | | | | |
| hsa-asg- | hsa-asg- | 7.3 | 6.72 | 7.03 | 6.06 | 6.79 | 0.55 | 50 | 6.32 | 6.87 | 4.80 | 5.13 | 5.93 | 6.49 | 5.34 | 4.92 | 6.10 | 5.77 | 0.74 | 0 | 3.27E−02 | 1.02 | 2.0 |
| 7228 | 7228_st1 | | | | | | | | | | | | | | | | | | | | | | |
| hsa-asg- | hsa-asg- | 5.0 | 5.77 | 4.46 | 6.07 | 5.34 | 0.72 | 50 | 5.04 | 4.50 | 4.23 | 5.19 | 3.57 | 3.82 | 3.99 | 4.39 | 4.19 | 4.32 | 0.53 | 0 | 1.49E−02 | 1.02 | 2.0 |
| 13074 | 13074_st2 | | | | | | | | | | | | | | | | | | | | | | |
| hsa-asg-8991 | hsa-asg-8991_st2 | 7.7 | 7.72 | 8.65 | 7.29 | 7.86 | 0.57 | 100 | 7.48 | 8.02 | 6.34 | 6.02 | 7.26 | 7.53 | 6.40 | 6.96 | 5.52 | 6.84 | 0.81 | 67 | 4.63E−02 | 1.02 | 2.0 |
| hsa-asg-13661 | hsa-asg- | 6.8 | 6.59 | 5.87 | 7.07 | 6.59 | 0.52 | 75 | 6.17 | 5.97 | 3.89 | 5.45 | 6.00 | 5.73 | 5.38 | 5.84 | 5.78 | 5.58 | 0.68 | 0 | 2.37E−02 | 1.01 | 2.0 |
| | 13661_st1 | | | | | | | | | | | | | | | | | | | | | | |
| hsa-asg-1133 | hsa-asg- | 10.0 | 9.31 | 10.1 | 9.77 | 9.81 | 0.37 | 25 | 9.30 | 9.27 | 7.85 | 8.65 | 9.39 | 9.31 | 8.47 | 8.65 | 8.33 | 8.80 | 0.54 | 11 | 6.53E−03 | 1.01 | 2.0 |
| | 1133_st2 | | | | | | | | | | | | | | | | | | | | | | |
| hsa-asg-12941 | hsa-asg- | 9.3 | 10.7 | 10.0 | 8.85 | 9.75 | 0.83 | 100 | 9.50 | 9.03 | 7.54 | 8.99 | 9.12 | 8.36 | 8.66 | 9.53 | 7.94 | 8.74 | 0.68 | 100 | 4.16E−02 | 1.00 | 2.0 |
| | 12941_st1 | | | | | | | | | | | | | | | | | | | | | | |

SD, standard deviation;
%, percentage of samples expressing miRNA above background levels;
Log2Diff, difference in VSN-transformed expression between NCo and LNneg samples.

[0289] A comparison of results from the two different microarray platforms revealed that most of the miRNAs identified as differentially expressed with the mirVana Bioarray platform were among the differentially expressed miRNAs identified on the miRChip microarray platform and include hsa-miR-200b, -200a, -200c, -141, -215, -375, -192, -194, -429, -203, -187, 133a, and -9 (Table 16 and Table 17 above). Fold change values for these microRNAs differed between the two platforms, reflecting differences in the probes, samples, and data analysis tools. In contrast, seven miRNAs (hsa-miR-1, -137, -10a, -422a, -124a, and -422b and ambi-miR-7072-corresponding to hsa-asg-13254 on the miRChip), identified on the mirVana Bioarray platform as significantly under-expressed in LNneg samples (Table 16), were not found to be significantly differentially expressed on the miRChip microarray platform. This is because the fold changes observed for these miRNAs on the miRChip platform were less than the 5-fold cut-off used for those data. The inventors identified three additional miRNAs (hsa-miR-605, -200a* and -133b) that were reported as significantly differentially expressed on the miRChip platform for which no probes were present on the mirVana Bioarray platform.

### Example 17

### QRT-PCR Verification of Differentially Expressed Micro-RNAs in Lymph Nodes from Colon Cancer Patients

[0290] The inventors evaluated the differential expression of selected miRNAs in seven cancer-positive lymph nodes from colon cancer patients (LNpos) and in seven control cancer-negative lymph nodes (LNneg, Example 15) by qRT-PCR. The LNpos samples were from patients with histologically-identified stage III colon cancer (T3N1M0 or T3N1M1-Table 15). qRT-PCR reactions were performed using TaqMan® MicroRNA Assays (Applied Biosystems; Foster City, Calif., USA) specific for fifteen of the most differentially expressed miRNAs between normal colon (NCo) and cancer-negative lymph node (LNneg) samples (hsa-miR-1, -9, -141, -187, -192, -194, -200a, -200b, -200c, -203, -215, -375, -429, -566, and -605). Assays were performed according to the manufacturer's instructions with 15 ng of input total RNA from one of the fourteen samples and were incubated in a 7900HT Fast Real-Time PCR system (Applied Biosystems, Foster City, Calif., USA). Initial data analysis was done using the 7500 Fast System SDS V2.3 software (Applied Biosystems). miR-16, whose expression level did not change between the different samples, was used for normalization. Equivalent t-tests were performed on the Cₜ values for individual qRT-PCR reaction without correction for multiple testing.

[0291] Significant differential expression between cancer-positive and cancer-negative lymph nodes was demonstrated by qRT-PCR quantification for ten of the fifteen miRNAs (miR-429, -200b, -141, -200a, -200c, -375, -203, -194, -192, -and -215) with fold changes varying between 760 fold (miR-429) and 77 fold (miR-215) (FIG. 10).

[0292] These data demonstrate that qRT-PCR quantification of selected miRNAs is an effective method for quantifying miRNA expression when evaluating metastasis of colon cancer to lymph nodes.

### Example 18

### Identification of Classifiers for Cancer-Positive Lymph Nodes in Patients with Metastatic Colon Cancer

[0293] The inventors have demonstrated that miRNA quantification and expression analysis can differentiate cancer-positive lymph nodes from patients with colon cancer and control cancer-negative lymph nodes. To further demonstrate the utility of specific miRNA markers as diagnostic analytes, the inventors quantified specific combinations of miRNAs by qRT-PCR to determine if any such combinations enhanced the distinction between cancer-positive and cancer-negative lymph nodes. qRT-PCR assays were performed as described in Example 17 above. For miRNA combinations quantified by qRT-PCR, normalized Ct values (miRNACt-miR-16Ct) from the quantification of individual miRNAs were added. The inventors determined that quantification of several miRNA combinations (miR-200b+miR-429; miR-200b+miR-203; miR-203+miR-429; miR-200b+miR-203+miR-429; miR-200a+miR-203+miR-429) enhances the distinction between cancer-positive and cancer-negative lymph nodes (FIG. 11).

[0294] These combinations serve as non-limiting examples. Combinations of qRT-PCR or microarray data for other microRNAs will serve to enhance the distinction between cancer-positive and cancer-negative lymph nodes. Interestingly, some miRNA combinations, such as miR-203+miR-429, can also be used as a classifier for the identification of metastatic lymph nodes in cervical cancer patients, in breast cancer patients, or in a subset of melanoma patients, underscoring the potential broad utility of these markers in cancer staging.

### Example 19

### miRNAs Differentally Expressed Between Normal Breast Tissue And Normal Lymph Nodes

[0295] To identify miRNAs that may be useful markers for metastasis of cancerous breast cells to lymph nodes, the inventors identified miRNAs that are expressed at significantly higher levels in normal breast tissue than in cancer-negative lymph nodes.

[0296] Total RNA, purified from three separate normal human breast tissue samples (FirstChoice® Human Breast Total RNA, cat. no. AM6952; Ambion, Austin, Tex., USA) and from nine normal human lymph node samples (FirstChoice® Human Lymph Node Total RNA, cat. no. AM7894; Ambion, Austin, Tex., USA) was purchased from Ambion. miRNA purification and labeling and microarray expression analyses were performed as described above in Example 2.

[0297] The inventors identified 872 miRNAs (87 verified, 785 predicted) with significant differential expression between normal breast tissues (NBR) and normal lymph nodes (LNneg) (log 2Diff breast vs LNneg≧1 and p-value<0.05) (Table 18). The average expression level of hsa-miR-205 was 196-fold higher in breast tissues compared with its average expression level in the normal lymph node samples. Among the verified miRNAs, thirteen miRNAs (hsa-miR-429, -200b, -411, -200c, -517a, -200a, -432, -368, -551b, -539, -452*, -376a, and -487b) had average expression levels that were 10- to 30-fold higher in breast tissue samples, and 26 miRNAs had average expression levels that were 5- to 10-fold higher in breast tissue samples. Among the predicted miRNAs, seven (hsa-asg-4209-st2, -3983_st2, -14160_st1, -13922_st1, -4803_st2, -5021_st1, and miR154-st1) had average expression levels that were between 10- and 20-fold higher in breast tissues, and 76 miRNAs had average expression levels that were between 5- and 10-fold higher in breast tissues.

TABLE 18
MicroRNAs Differentially Expressed Between Normal Breast Samples (NBR) and
Cancer-Negative Lymph Node Samples (LNneg) from Patients.

| | | NBR | | | | | | LNneg | | | | | | | | | | | | | | |
|---|---|---|---|---|---|---|---|---|---|---|---|---|---|---|---|---|---|---|---|---|---|---|
| MicroRNA | Probe ID | 1 | 2 | 3 | Mean | SD | % | 1 | 2 | 3 | 4 | 5 | 6 | 7 | 8 | 9 | Mean | SD | % | ttest | log2Diff | Fold |
| hsa-miR- | hsa-miR- | 12.7 | 11.7 | 12.5 | 12.36 | 0.51 | 100 | 2.93 | 5.91 | 5.64 | 2.03 | 3.59 | 6.11 | 3.40 | 5.32 | 7.76 | 4.74 | 1.85 | 33 | 4.4E−05 | 7.62 | 196.2 |
| 205 | 205_st1 | | | | | | | | | | | | | | | | | | | | | |
| hsa-miR- | hsa-miR- | 8.95 | 6.33 | 7.80 | 7.70 | 1.31 | 100 | 3.45 | 1.54 | 3.67 | 2.13 | 2.37 | 2.69 | 2.32 | 2.45 | 5.39 | 2.89 | 1.14 | 0 | 1.1E−04 | 4.81 | 28.0 |
| 429 | 429_st1 | | | | | | | | | | | | | | | | | | | | | |
| hsa-miR- | hsa-miR- | 12.9 | 11.2 | 12.2 | 12.14 | 0.87 | 100 | 7.62 | 7.80 | 8.90 | 6.69 | 6.82 | 6.87 | 6.51 | 7.65 | 10.4 | 7.70 | 1.26 | 100 | 2.3E−04 | 4.44 | 21.7 |
| 200b | 200b_st1 | | | | | | | | | | | | | | | | | | | | | |
| hsa-asg- | hsa-asg- | 8.25 | 8.96 | 7.97 | 8.39 | 0.51 | 100 | 4.24 | 5.01 | 3.60 | 4.30 | 5.45 | 5.18 | 2.92 | 3.13 | 4.43 | 4.25 | 0.89 | 0 | 2.0E−05 | 4.14 | 17.6 |
| 4209 | 4209_st2 | | | | | | | | | | | | | | | | | | | | | |
| hsa-asg- | hsa-asg- | 9.74 | 10.5 | 9.54 | 9.93 | 0.52 | 100 | 4.52 | 6.72 | 5.37 | 5.40 | 6.05 | 7.03 | 5.00 | 5.78 | 6.33 | 5.80 | 0.81 | 0 | 1.0E−05 | 4.13 | 17.6 |
| 3983 | 3983_st1 | | | | | | | | | | | | | | | | | | | | | |
| hsa-miR- | hsa-miR- | 8.66 | 6.90 | 7.83 | 7.80 | 0.88 | 100 | 4.85 | 3.74 | 4.54 | 5.23 | 5.56 | 2.99 | 3.40 | 2.27 | 2.10 | 3.85 | 1.27 | 11 | 5.9E−04 | 3.95 | 15.4 |
| 411 | 411_st1 | | | | | | | | | | | | | | | | | | | | | |
| hsa-miR- | hsa-miR- | 13.5 | 12.1 | 13.2 | 12.96 | 0.74 | 100 | 9.60 | 8.84 | 10.3 | 8.18 | 8.15 | 8.14 | 7.98 | 8.89 | 11.5 | 9.07 | 1.21 | 100 | 4.1E−04 | 3.90 | 14.9 |
| 200c | 200c_st1 | | | | | | | | | | | | | | | | | | | | | |
| hsa-asg- | hsa-asg- | 6.23 | 6.89 | 6.36 | 6.49 | 0.35 | 67 | 0.14 | 3.58 | 3.73 | 2.85 | 0.86 | 3.99 | 3.05 | 1.78 | 3.59 | 2.62 | 1.38 | 0 | 8.6E−04 | 3.87 | 14.6 |
| 14160 | 14160_st1 | | | | | | | | | | | | | | | | | | | | | |
| hsa-miR- | hsa-miR- | 8.48 | 7.40 | 7.84 | 7.91 | 0.55 | 100 | 4.85 | 5.37 | 6.26 | 3.57 | 3.10 | 3.82 | 4.20 | 3.74 | 1.86 | 4.09 | 1.29 | 0 | 6.6E−04 | 3.82 | 14.1 |
| 517a | 517a_st1 | | | | | | | | | | | | | | | | | | | | | |
| hsa-miR- | hsa-miR- | 8.53 | 7.49 | 8.00 | 8.01 | 0.52 | 100 | 4.99 | 5.61 | 6.51 | 3.87 | 3.22 | 3.82 | 4.07 | 3.91 | 2.54 | 4.28 | 1.22 | 22 | 5.3E−04 | 3.72 | 13.2 |
| 517a | 517b_st1 | | | | | | | | | | | | | | | | | | | | | |
| hsa-miR- | hsa-miR- | 10.8 | 7.65 | 9.22 | 9.25 | 1.62 | 100 | 6.27 | 5.08 | 6.49 | 5.72 | 5.29 | 4.60 | 4.07 | 4.78 | 7.78 | 5.56 | 1.14 | 67 | 1.2E−03 | 3.69 | 12.9 |
| 200a | 200a_st2 | | | | | | | | | | | | | | | | | | | | | |
| hsa-asg- | hsa-asg- | 5.67 | 8.35 | 8.61 | 7.54 | 1.63 | 100 | 4.71 | 5.40 | 1.66 | 4.84 | 5.58 | 5.17 | 4.07 | 2.27 | 1.38 | 3.90 | 1.67 | 0 | 8.1E−03 | 3.64 | 12.5 |
| 13922 | 13922_st1 | | | | | | | | | | | | | | | | | | | | | |
| hsa-miR- | hsa-miR- | 9.43 | 7.10 | 8.81 | 8.45 | 1.20 | 100 | 4.55 | 5.43 | 5.92 | 5.53 | 5.77 | 5.68 | 3.50 | 4.28 | 2.74 | 4.82 | 1.13 | 22 | 7.7E−04 | 3.62 | 12.3 |
| 432 | 432_st2 | | | | | | | | | | | | | | | | | | | | | |
| hsa-asg- | hsa-asg- | 7.09 | 7.64 | 7.42 | 7.38 | 0.28 | 100 | 4.94 | 6.05 | 1.79 | 3.52 | 5.42 | 5.03 | 3.17 | 1.98 | 2.21 | 3.79 | 1.62 | 0 | 4.0E−03 | 3.59 | 12.1 |
| 4803 | 4803_st2 | | | | | | | | | | | | | | | | | | | | | |
| hsa-miR- | hsa-miR- | 10.3 | 9.19 | 9.98 | 9.84 | 0.58 | 100 | 6.49 | 6.52 | 7.70 | 8.08 | 7.70 | 5.24 | 5.64 | 3.99 | 5.09 | 6.27 | 1.39 | 67 | 1.8E−03 | 3.56 | 11.8 |
| 368 | 368_st2 | | | | | | | | | | | | | | | | | | | | | |
| hsa-miR- | hsa-miR- | 6.96 | 7.94 | 8.58 | 7.83 | 0.82 | 100 | 4.81 | 4.86 | 4.87 | 4.76 | 4.00 | 2.69 | 4.14 | 2.93 | 4.40 | 4.16 | 0.83 | 0 | 5.8E−05 | 3.66 | 12.7 |
| 551b | 551b_st1 | | | | | | | | | | | | | | | | | | | | | |
| hsa-miR- | hsa- | 7.19 | 7.92 | 8.52 | 7.88 | 0.66 | 100 | 5.25 | 4.43 | 3.79 | 5.85 | 3.39 | 4.03 | 4.82 | 3.54 | 4.32 | 4.38 | 0.81 | 22 | 5.4E−05 | 3.50 | 11.3 |
| 551b | miR167_st2 | | | | | | | | | | | | | | | | | | | | | |
| hsa-asg- | hsa-asg- | 8.99 | 6.93 | 8.44 | 8.12 | 1.07 | 100 | 5.18 | 4.43 | 6.99 | 6.06 | 5.91 | 3.54 | 4.59 | 3.07 | 2.10 | 4.65 | 1.57 | 22 | 5.6E−03 | 3.47 | 11.1 |
| 5021 | 5021_st1 | | | | | | | | | | | | | | | | | | | | | |
| hsa-miR- | hsa-miR- | 8.41 | 6.96 | 8.14 | 7.84 | 0.77 | 100 | 5.14 | 4.08 | 5.49 | 5.67 | 4.85 | 4.03 | 2.48 | 3.83 | 3.77 | 4.37 | 1.01 | 0 | 3.1E−04 | 3.47 | 11.0 |
| 376a | 376a_st2 | | | | | | | | | | | | | | | | | | | | | |
| hsa-miR- | hsa-asg- | 7.52 | 5.89 | 7.62 | 7.01 | 0.97 | 100 | 3.33 | 4.30 | 3.39 | 4.00 | 4.85 | 3.69 | 2.92 | 4.07 | 1.86 | 3.60 | 0.87 | 0 | 1.8E−04 | 3.41 | 10.6 |
| 376a | 14234_st1 | | | | | | | | | | | | | | | | | | | | | |
| hsa-miR- | hsa-asg- | 8.79 | 7.11 | 8.65 | 8.18 | 0.93 | 100 | 5.03 | 4.91 | 6.09 | 5.56 | 5.35 | 4.10 | 3.85 | 4.14 | 4.67 | 4.85 | 0.74 | 11 | 8.1E−05 | 3.33 | 10.0 |
| 376a | 10049_st1 | | | | | | | | | | | | | | | | | | | | | |
| hsa-miR- | hsa-miR- | 6.72 | 5.06 | 6.20 | 5.99 | 0.85 | 100 | 2.05 | 3.16 | 2.66 | 3.40 | 2.69 | 2.99 | 1.97 | 2.62 | 1.38 | 2.55 | 0.64 | 0 | 2.0E−05 | 3.45 | 10.9 |
| 539 | 539_st1 | | | | | | | | | | | | | | | | | | | | | |
| hsa-miR- | hsa-miR- | 6.78 | 7.22 | 7.59 | 7.20 | 0.40 | 100 | 4.76 | 4.66 | 3.39 | 5.42 | 4.97 | 2.92 | 2.32 | 2.27 | 3.39 | 3.79 | 1.19 | 0 | 7.9E−04 | 3.41 | 10.6 |
| 452* | 452-_st1 | | | | | | | | | | | | | | | | | | | | | |
| hsa- | hsa- | 8.50 | 8.75 | 9.25 | 8.83 | 0.38 | 100 | 6.80 | 6.00 | 4.98 | 7.76 | 6.35 | 4.31 | 6.07 | 3.07 | 4.16 | 5.50 | 1.48 | 56 | 3.7E−03 | 3.33 | 10.1 |
| miR154 | miR154_st1 | | | | | | | | | | | | | | | | | | | | | |
| hsa-miR- | hsa-miR- | 9.83 | 7.58 | 9.39 | 8.93 | 1.19 | 100 | 6.06 | 5.84 | 6.97 | 6.90 | 6.25 | 5.40 | 4.90 | 3.74 | 4.40 | 5.61 | 1.10 | 67 | 1.2E−03 | 3.33 | 10.0 |
| 487b | 487b_st2 | | | | | | | | | | | | | | | | | | | | | |
| hsa- | hsa- | 5.99 | 7.90 | 7.79 | 7.23 | 1.07 | 67 | 6.04 | 4.27 | 2.05 | 4.84 | 5.97 | 5.09 | 1.08 | 3.38 | 3.01 | 3.97 | 1.72 | 11 | 1.2E−02 | 3.26 | 9.6 |
| cand733 | cand733_st1 | | | | | | | | | | | | | | | | | | | | | |
| hsa-asg- | hsa-asg- | 9.10 | 9.15 | 9.58 | 9.28 | 0.26 | 100 | 7.66 | 6.59 | 4.47 | 8.11 | 7.31 | 4.95 | 6.96 | 3.91 | 4.32 | 6.03 | 1.61 | 56 | 7.2E−03 | 3.24 | 9.5 |
| 13097 | 13097_st1 | | | | | | | | | | | | | | | | | | | | | |
| hsa-asg- | hsa-asg- | 9.06 | 7.01 | 8.31 | 8.13 | 1.04 | 100 | 5.60 | 5.37 | 6.65 | 5.89 | 5.90 | 4.03 | 4.73 | 2.45 | 3.39 | 4.89 | 1.36 | 56 | 3.9E−03 | 3.24 | 9.4 |
| 13254 | 13254_st1 | | | | | | | | | | | | | | | | | | | | | |
| hsa-miR- | hsa-miR- | 9.73 | 9.68 | 10.4 | 9.94 | 0.41 | 100 | 7.92 | 6.71 | 6.74 | 8.78 | 7.67 | 5.74 | 7.42 | 4.41 | 5.39 | 6.75 | 1.38 | 67 | 3.2E−03 | 3.19 | 9.1 |
| 452 | 452_st1 | | | | | | | | | | | | | | | | | | | | | |
| hsa-asg- | hsa-asg- | 10.2 | 9.90 | 9.71 | 9.97 | 0.29 | 100 | 5.80 | 9.48 | 5.28 | 6.28 | 6.63 | 9.24 | 5.33 | 5.95 | 7.45 | 6.83 | 1.58 | 33 | 7.8E−03 | 3.14 | 8.8 |
| 10154 | 10154_st1 | | | | | | | | | | | | | | | | | | | | | |
| hsa-asg- | hsa-asg- | 9.18 | 10.2 | 9.12 | 9.51 | 0.63 | 100 | 6.02 | 7.47 | 5.43 | 6.29 | 6.40 | 7.09 | 5.61 | 6.39 | 6.67 | 6.38 | 0.65 | 67 | 2.7E−05 | 3.14 | 8.8 |
| 5728 | 5728_st2 | | | | | | | | | | | | | | | | | | | | | |
| hsa-miR- | hsa- | 6.26 | 4.33 | 5.43 | 5.34 | 0.97 | 67 | 2.61 | 2.54 | 1.39 | 2.42 | 1.83 | 1.88 | 3.50 | 1.68 | 2.10 | 2.22 | 0.63 | 0 | 6.1E−05 | 3.12 | 8.7 |
| 539 | miR177_st1 | | | | | | | | | | | | | | | | | | | | | |
| hsa-asg- | hsa-asg- | 5.95 | 3.91 | 5.46 | 5.10 | 1.07 | 67 | 1.65 | 2.16 | 1.92 | 2.03 | 2.90 | 1.78 | 3.59 | 0.93 | 0.93 | 1.99 | 0.85 | 0 | 4.1E−04 | 3.12 | 8.7 |
| 7472 | 7472_st2 | | | | | | | | | | | | | | | | | | | | | |
| hsa-asg-20 | hsa-asg- | 4.32 | 6.75 | 6.61 | 5.89 | 1.36 | 67 | 3.93 | 3.96 | 1.02 | 3.52 | 3.85 | 3.54 | 1.42 | 2.36 | 1.50 | 2.79 | 1.21 | 0 | 3.8E−03 | 3.10 | 8.6 |
| | 20_st1 | | | | | | | | | | | | | | | | | | | | | |
| hsa-asg- | hsa-asg- | 8.26 | 10.5 | 10.5 | 9.78 | 1.32 | 67 | 8.10 | 7.67 | 5.28 | 7.68 | 8.03 | 7.00 | 6.23 | 6.39 | 3.77 | 6.68 | 1.44 | 0 | 8.3E−03 | 3.09 | 8.5 |
| 5996 | 5996_st2 | | | | | | | | | | | | | | | | | | | | | |
| hsa-miR- | hsa-miR- | 8.32 | 10.7 | 10.7 | 9.92 | 1.39 | 33 | 8.21 | 7.70 | 3.91 | 7.79 | 8.20 | 6.93 | 6.29 | 7.20 | 5.39 | 6.84 | 1.44 | 0 | 8.9E−03 | 3.08 | 8.4 |
| 572 | 572_st1 | | | | | | | | | | | | | | | | | | | | | |
| hsa-miR- | hsa-miR- | 7.53 | 5.49 | 6.68 | 6.57 | 1.02 | 100 | 3.76 | 2.54 | 4.30 | 4.36 | 4.91 | 3.13 | 3.17 | 1.29 | 3.97 | 3.49 | 1.10 | 0 | 1.7E−03 | 3.07 | 8.4 |
| 154 | 154_st2 | | | | | | | | | | | | | | | | | | | | | |
| hsa-asg- | hsa-asg- | 8.20 | 5.39 | 7.04 | 6.87 | 1.41 | 67 | 3.66 | 2.54 | 4.47 | 3.46 | 3.93 | 4.03 | 3.29 | 3.64 | 5.27 | 3.81 | 0.76 | 0 | 5.8E−04 | 3.07 | 8.4 |
| 7637 | 7637_st2 | | | | | | | | | | | | | | | | | | | | | |
| hsa-asg- | hsa-asg- | 6.38 | 5.28 | 5.86 | 5.84 | 0.55 | 100 | 3.76 | 3.29 | 3.91 | 3.63 | 3.44 | 2.69 | 1.42 | 1.48 | 1.62 | 2.80 | 1.03 | 0 | 7.5E−04 | 3.04 | 8.2 |
| 5617 | 5617_st1 | | | | | | | | | | | | | | | | | | | | | |
| hsa-asg- | hsa-asg- | 9.10 | 9.19 | 9.47 | 9.25 | 0.19 | 100 | 7.62 | 6.37 | 4.47 | 7.82 | 7.31 | 5.81 | 7.02 | 5.04 | 4.54 | 6.22 | 1.32 | 56 | 3.1E−03 | 3.03 | 8.2 |
| 14134 | 14134_st1 | | | | | | | | | | | | | | | | | | | | | |
| hsa-asg- | hsa-asg- | 7.81 | 5.94 | 7.19 | 6.98 | 0.96 | 100 | 4.49 | 3.42 | 4.87 | 4.95 | 4.11 | 4.18 | 3.59 | 2.08 | 4.07 | 3.97 | 0.88 | 0 | 4.9E−04 | 3.01 | 8.0 |
| 13166 | 13166_st2 | | | | | | | | | | | | | | | | | | | | | |
| hsa-asg- | hsa-asg- | 6.94 | 6.89 | 7.17 | 7.00 | 0.15 | 100 | 3.45 | 5.54 | 3.14 | 3.28 | 3.77 | 5.15 | 3.59 | 3.69 | 4.57 | 4.02 | 0.86 | 0 | 1.7E−04 | 2.98 | 7.9 |
| 7721 | 7721_st1 | | | | | | | | | | | | | | | | | | | | | |
| hsa-miR- | hsa-miR- | 6.48 | 4.35 | 5.71 | 5.51 | 1.08 | 67 | 2.43 | 2.36 | 1.39 | 3.73 | 2.53 | 2.85 | 3.17 | 1.88 | 2.54 | 2.54 | 0.68 | 0 | 1.8E−04 | 2.97 | 7.8 |
| 410 | 410_st1 | | | | | | | | | | | | | | | | | | | | | |
| hsa-miR- | hsa-miR- | 8.71 | 5.39 | 7.36 | 7.15 | 1.67 | 100 | 5.07 | 3.83 | 4.93 | 4.43 | 4.39 | 2.85 | 3.85 | 3.83 | 4.54 | 4.19 | 0.68 | 0 | 9.5E−04 | 2.96 | 7.8 |
| 141 | 141_st1 | | | | | | | | | | | | | | | | | | | | | |
| hsa-asg- | hsa-asg- | 7.52 | 7.41 | 6.99 | 7.31 | 0.28 | 100 | 3.33 | 6.46 | 3.79 | 4.12 | 4.53 | 6.95 | 1.08 | 4.63 | 4.60 | 4.39 | 1.71 | 22 | 1.7E−02 | 2.92 | 7.6 |
| 13403 | 13403_st2 | | | | | | | | | | | | | | | | | | | | | |
| hsa-miR- | hsa-miR- | 7.06 | 5.00 | 5.96 | 6.01 | 1.03 | 100 | 2.78 | 2.36 | 4.21 | 3.40 | 4.21 | 2.99 | 3.50 | 1.29 | 3.25 | 3.11 | 0.91 | 0 | 9.2E−04 | 2.90 | 7.5 |
| 381 | 381_st2 | | | | | | | | | | | | | | | | | | | | | |
| hsa-asg- | hsa-asg- | 8.82 | 9.20 | 8.58 | 8.87 | 0.32 | 100 | 6.77 | 7.23 | 5.17 | 6.11 | 7.01 | 6.56 | 5.02 | 5.58 | 4.70 | 6.01 | 0.93 | 56 | 4.9E−04 | 2.86 | 7.2 |
| 6623 | 6623_st2 | | | | | | | | | | | | | | | | | | | | | |
| hsa-asg- | hsa-asg- | 6.96 | 7.02 | 6.54 | 6.84 | 0.26 | 100 | 2.78 | 7.06 | 0.79 | 3.28 | 3.28 | 6.80 | 3.40 | 3.49 | 5.02 | 3.99 | 1.99 | 22 | 3.7E−02 | 2.85 | 7.2 |
| 8711 | 8711_st1 | | | | | | | | | | | | | | | | | | | | | |
| hsa-asg- | hsa-asg- | 4.52 | 5.92 | 5.55 | 5.33 | 0.73 | 67 | 2.25 | 3.29 | 2.18 | 1.72 | 2.76 | 3.13 | 1.79 | 2.62 | 2.74 | 2.50 | 0.55 | 0 | 3.0E−05 | 2.83 | 7.1 |
| 5176 | 5176_st2 | | | | | | | | | | | | | | | | | | | | | |
| hsa-asg- | hsa-asg- | 8.89 | 9.23 | 8.76 | 8.96 | 0.24 | 100 | 6.85 | 7.21 | 5.37 | 6.52 | 6.92 | 7.10 | 5.19 | 4.96 | 5.09 | 6.13 | 0.96 | 56 | 6.0E−04 | 2.83 | 7.1 |
| 1375 | 1375_st1 | | | | | | | | | | | | | | | | | | | | | |
| hsa- | hsa-cand926_st2 | 6.52 | 7.33 | 6.12 | 6.66 | 0.61 | 33 | 4.31 | 4.27 | 2.96 | 4.23 | 4.00 | 3.82 | 2.48 | 4.55 | 3.92 | 3.84 | 0.68 | 0 | 8.5E−05 | 2.82 | 7.1 |
| cand926 | | | | | | | | | | | | | | | | | | | | | | |
| hsa-asg- | hsa-asg- | 8.70 | 10.2 | 10.6 | 9.84 | 1.01 | 67 | 8.03 | 7.79 | 5.04 | 7.50 | 8.30 | 6.93 | 6.69 | 7.60 | 5.39 | 7.03 | 1.15 | 44 | 3.6E−03 | 2.82 | 7.0 |
| 5205 | 5205_st1 | | | | | | | | | | | | | | | | | | | | | |
| hsa-asg- | hsa-asg- | 7.26 | 6.95 | 6.62 | 6.94 | 0.32 | 100 | 2.78 | 6.91 | 3.91 | 4.46 | 4.39 | 7.62 | 1.79 | 3.32 | 2.10 | 4.14 | 2.01 | 22 | 4.1E−02 | 2.80 | 7.0 |
| 11424 | 11424_st1 | | | | | | | | | | | | | | | | | | | | | |
| hsa-miR- | hsa-miR- | 10.0 | 8.33 | 9.51 | 9.31 | 0.90 | 100 | 6.81 | 5.57 | 7.95 | 7.53 | 7.69 | 5.72 | 6.59 | 5.49 | 5.44 | 6.53 | 1.02 | 56 | 1.8E−03 | 2.78 | 6.9 |
| 127 | 127_st1 | | | | | | | | | | | | | | | | | | | | | |
| hsa-miR- | hsa-miR- | 6.47 | 4.79 | 4.71 | 5.33 | 0.99 | 33 | 2.61 | 2.16 | 3.06 | 0.75 | 1.74 | 2.17 | 2.92 | 3.07 | 4.47 | 2.55 | 1.03 | 0 | 2.2E−03 | 2.78 | 6.9 |
| 605 | 605_st1 | | | | | | | | | | | | | | | | | | | | | |
| hsa-asg- | hsa-asg- | 6.54 | 6.89 | 6.87 | 6.77 | 0.20 | 100 | 4.17 | 5.30 | 3.79 | 4.00 | 4.97 | 4.75 | 1.60 | 2.93 | 4.47 | 4.00 | 1.14 | 11 | 2.2E−03 | 2.77 | 6.8 |
| 12947 | 12947_st1 | | | | | | | | | | | | | | | | | | | | | |
| hsa-asg- | hsa-asg- | 6.70 | 6.90 | 6.51 | 6.70 | 0.20 | 100 | 5.48 | 5.17 | 2.54 | 1.93 | 4.08 | 5.35 | 2.32 | 4.66 | 3.92 | 3.94 | 1.37 | 0 | 7.0E−03 | 2.77 | 6.8 |
| 13417 | 13417_st2 | | | | | | | | | | | | | | | | | | | | | |
| hsa-miR- | hsa-miR- | 10.2 | 8.47 | 9.34 | 9.36 | 0.89 | 100 | 6.52 | 6.42 | 7.11 | 6.97 | 7.04 | 6.59 | 6.35 | 6.14 | 6.23 | 6.60 | 0.36 | 100 | 1.0E−05 | 2.76 | 6.8 |
| 379 | 379_st1 | | | | | | | | | | | | | | | | | | | | | |
| hsa-asg- | hsa-asg- | 6.98 | 5.17 | 6.34 | 6.16 | 0.92 | 67 | 4.66 | 4.30 | 3.39 | 4.46 | 2.69 | 2.77 | 2.15 | 2.78 | 3.53 | 3.41 | 0.89 | 0 | 9.9E−04 | 2.75 | 6.7 |
| 924 | 924_st1 | | | | | | | | | | | | | | | | | | | | | |
| hsa-miR- | hsa-miR- | 8.36 | 6.67 | 7.44 | 7.49 | 0.85 | 100 | 5.73 | 4.49 | 5.80 | 6.38 | 5.99 | 2.99 | 5.05 | 2.45 | 3.97 | 4.76 | 1.39 | 44 | 1.0E−02 | 2.73 | 6.6 |
| 299-5p | 299-5p_st2 | | | | | | | | | | | | | | | | | | | | | |
| hsa-asg- | hsa-asg- | 10.1 | 10.1 | 9.64 | 10.00 | 0.31 | 100 | 8.49 | 8.90 | 6.16 | 7.50 | 7.67 | 8.35 | 5.87 | 6.05 | 6.44 | 7.27 | 1.17 | 56 | 3.0E−03 | 2.73 | 6.6 |
| 1699 | 1699_st2 | | | | | | | | | | | | | | | | | | | | | |
| hsa-asg- | hsa-asg- | 11.0 | 10.7 | 10.3 | 10.69 | 0.32 | 100 | 7.27 | 10.1 | 7.20 | 7.56 | 7.99 | 9.98 | 6.73 | 7.46 | 7.47 | 7.97 | 1.22 | 100 | 4.0E−03 | 2.71 | 6.6 |
| 12729 | 12729_st1 | | | | | | | | | | | | | | | | | | | | | |
| hsa-asg- | hsa-asg- | 7.15 | 9.60 | 10.0 | 8.94 | 1.57 | 67 | 6.93 | 7.30 | 4.98 | 6.81 | 8.07 | 7.15 | 6.29 | 4.66 | 3.87 | 6.23 | 1.41 | 0 | 1.7E−02 | 2.71 | 6.6 |
| 9510 | 9510_st1 | | | | | | | | | | | | | | | | | | | | | |
| hsa-asg- | hsa-asg- | 6.77 | 6.55 | 6.20 | 6.51 | 0.29 | 100 | 2.43 | 5.72 | 3.23 | 2.85 | 3.39 | 5.09 | 3.05 | 4.14 | 4.40 | 3.81 | 1.10 | 11 | 2.1E−03 | 2.70 | 6.5 |
| 8955 | 8955_st2 | | | | | | | | | | | | | | | | | | | | | |
| hsa-miR- | hsa-miR- | 8.68 | 6.95 | 8.00 | 7.88 | 0.87 | 100 | 5.11 | 5.78 | 5.99 | 5.85 | 5.70 | 4.21 | 4.73 | 4.31 | 5.02 | 5.19 | 0.68 | 0 | 2.2E−04 | 2.69 | 6.4 |
| 134 | 134_st2 | | | | | | | | | | | | | | | | | | | | | |
| hsa-asg- | hsa-asg- | 8.49 | 8.85 | 8.62 | 8.65 | 0.18 | 100 | 6.77 | 7.55 | 5.09 | 5.80 | 6.85 | 6.60 | 5.09 | 5.19 | 4.78 | 5.97 | 0.99 | 56 | 1.1E−03 | 2.69 | 6.4 |
| 12996 | 12996_st1 | | | | | | | | | | | | | | | | | | | | | |
| hsa- | hsa-cand503_st2 | 7.39 | 7.80 | 6.84 | 7.34 | 0.48 | 100 | 5.80 | 6.64 | 4.17 | 3.57 | 5.19 | 6.36 | 1.60 | 4.25 | 4.43 | 4.67 | 1.56 | 22 | 1.7E−02 | 2.68 | 6.4 |
| cand503 | | | | | | | | | | | | | | | | | | | | | | |
| hsa-asg- | hsa-asg- | 4.42 | 7.75 | 7.90 | 6.69 | 1.97 | 67 | 4.76 | 4.49 | 3.23 | 4.30 | 5.75 | 4.55 | 3.77 | 3.91 | 1.38 | 4.01 | 1.21 | 11 | 1.6E−02 | 2.68 | 6.4 |
| 3081 | 3081_st1 | | | | | | | | | | | | | | | | | | | | | |
| hsa-asg- | hsa-asg- | 9.70 | 9.43 | 9.08 | 9.40 | 0.31 | 100 | 6.57 | 8.76 | 5.60 | 6.57 | 7.38 | 8.88 | 5.49 | 5.90 | 5.42 | 6.73 | 1.34 | 56 | 7.8E−03 | 2.67 | 6.4 |
| 14137 | 14137_st1 | | | | | | | | | | | | | | | | | | | | | |
| hsa-miR- | hsa-miR- | 11.9 | 11.4 | 11.6 | 11.69 | 0.25 | 100 | 9.40 | 9.08 | 9.04 | 10.6 | 10.3 | 8.25 | 9.05 | 6.55 | 8.85 | 9.03 | 1.19 | 100 | 3.9E−03 | 2.67 | 6.3 |
| 199b | 199b_st2 | | | | | | | | | | | | | | | | | | | | | |
| hsa-miR- | hsa-asg- | 6.15 | 4.90 | 5.55 | 5.53 | 0.62 | 67 | 2.43 | 3.02 | 3.91 | 2.77 | 2.53 | 2.07 | 2.32 | 3.64 | 3.09 | 2.87 | 0.61 | 0 | 6.8E−05 | 2.66 | 6.3 |
| 516-5p | 13160_st1 | | | | | | | | | | | | | | | | | | | | | |
| hsa-asg- | hsa-asg- | 5.51 | 6.82 | 6.15 | 6.16 | 0.66 | 33 | 3.07 | 5.71 | 2.31 | 2.69 | 2.28 | 6.12 | 2.32 | 2.36 | 4.70 | 3.51 | 1.57 | 0 | 1.9E−02 | 2.66 | 6.3 |
| 6008 | 6008_st2 | | | | | | | | | | | | | | | | | | | | | |
| hsa-miR- | hsa-miR- | 6.49 | 7.34 | 6.93 | 6.92 | 0.43 | 100 | 4.71 | 4.46 | 4.84 | 6.39 | 5.46 | 2.17 | 6.16 | 3.59 | 0.63 | 4.27 | 1.88 | 22 | 4.0E−02 | 2.65 | 6.3 |
| 378 | 378_st1 | | | | | | | | | | | | | | | | | | | | | |
| hsa-miR- | hsa-miR- | 8.97 | 6.65 | 8.08 | 7.90 | 1.17 | 100 | 6.02 | 4.81 | 6.97 | 6.26 | 6.32 | 4.43 | 5.16 | 2.45 | 4.89 | 5.26 | 1.35 | 56 | 1.2E−02 | 2.65 | 6.3 |
| 495 | 495_st1 | | | | | | | | | | | | | | | | | | | | | |
| hsa-asg- | hsa-asg- | 7.79 | 8.92 | 9.04 | 8.58 | 0.69 | 100 | 6.40 | 7.41 | 3.46 | 6.18 | 7.07 | 6.93 | 5.92 | 5.20 | 4.92 | 5.94 | 1.24 | 67 | 6.4E−03 | 2.64 | 6.2 |
| 1020 | 1020_st2 | | | | | | | | | | | | | | | | | | | | | |
| hsa-miR- | hsa-miR- | 7.11 | 4.89 | 6.27 | 6.09 | 1.12 | 100 | 3.56 | 2.71 | 4.47 | 4.36 | 4.36 | 2.53 | 2.92 | 2.62 | 3.53 | 3.45 | 0.80 | 0 | 1.0E−03 | 2.64 | 6.2 |
| 369-5p | 369-5p_st2 | | | | | | | | | | | | | | | | | | | | | |
| hsa-miR- | hsa-asg- | 6.67 | 5.10 | 6.26 | 6.01 | 0.82 | 67 | 3.76 | 3.42 | 4.02 | 2.23 | 3.72 | 3.73 | 3.40 | 2.78 | 3.53 | 3.40 | 0.56 | 0 | 8.5E−05 | 2.61 | 6.1 |
| 369-5p | 1521_st1 | | | | | | | | | | | | | | | | | | | | | |
| hsa-miR- | hsa-miR- | 6.43 | 4.84 | 5.52 | 5.60 | 0.80 | 67 | 4.55 | 3.74 | 3.91 | 1.21 | 2.53 | 2.61 | 2.78 | 2.62 | 2.74 | 2.97 | 0.98 | 0 | 1.8E−03 | 2.63 | 6.2 |
| 516-5p | 516-5p_st1 | | | | | | | | | | | | | | | | | | | | | |
| hsa-asg- | hsa-asg- | 8.43 | 8.85 | 8.74 | 8.67 | 0.22 | 100 | 6.77 | 7.40 | 4.96 | 6.31 | 6.94 | 6.77 | 5.51 | 4.89 | 4.81 | 6.04 | 1.00 | 56 | 1.4E−03 | 2.63 | 6.2 |
| 4116 | 4116_st2 | | | | | | | | | | | | | | | | | | | | | |
| hsa-asg- | hsa-asg- | 8.16 | 7.87 | 7.70 | 7.91 | 0.24 | 100 | 4.37 | 7.42 | 4.12 | 4.84 | 4.85 | 7.60 | 2.78 | 5.19 | 6.37 | 5.28 | 1.58 | 33 | 1.9E−02 | 2.63 | 6.2 |
| 13770 | 13770_st1 | | | | | | | | | | | | | | | | | | | | | |
| hsa-asg- | hsa-asg- | 6.04 | 8.11 | 8.07 | 7.41 | 1.19 | 100 | 5.98 | 5.12 | 3.23 | 5.27 | 6.03 | 5.05 | 4.54 | 3.91 | 3.97 | 4.79 | 0.95 | 44 | 2.9E−03 | 2.62 | 6.1 |
| 13077 | 13077_st1 | | | | | | | | | | | | | | | | | | | | | |
| hsa-asg- | hsa-asg- | 9.22 | 9.36 | 9.13 | 9.24 | 0.11 | 100 | 7.34 | 7.90 | 5.30 | 6.60 | 7.15 | 7.33 | 5.35 | 6.34 | 6.26 | 6.62 | 0.90 | 78 | 6.6E−04 | 2.62 | 6.1 |
| 555 | 555_st1 | | | | | | | | | | | | | | | | | | | | | |
| hsa-asg- | hsa-asg- | 10.9 | 10.5 | 10.5 | 10.65 | 0.22 | 100 | 7.09 | 10.3 | 7.00 | 7.93 | 8.20 | 10.6 | 6.70 | 7.21 | 7.18 | 8.04 | 1.48 | 100 | 1.4E−02 | 2.61 | 6.1 |
| 9112 | 9112_st2 | | | | | | | | | | | | | | | | | | | | | |
| hsa-asg- | hsa-asg- | 5.69 | 6.65 | 5.60 | 5.98 | 0.58 | 33 | 3.93 | 4.63 | 1.79 | 1.31 | 5.45 | 5.35 | 1.25 | 3.49 | 3.17 | 3.37 | 1.64 | 0 | 2.5E−02 | 2.60 | 6.1 |
| 13498 | 13498_st1 | | | | | | | | | | | | | | | | | | | | | |
| hsa-asg- | hsa-asg- | 9.35 | 9.41 | 8.91 | 9.22 | 0.27 | 100 | 6.37 | 8.24 | 5.55 | 6.45 | 7.02 | 8.27 | 5.73 | 5.96 | 6.10 | 6.63 | 1.02 | 78 | 1.7E−03 | 2.59 | 6.0 |
| 5998 | 5998_st1 | | | | | | | | | | | | | | | | | | | | | |
| hsa-miR- | hsa-miR- | 6.94 | 6.21 | 6.37 | 6.51 | 0.38 | 67 | 2.43 | 5.25 | 4.17 | 3.91 | 3.85 | 5.50 | 3.68 | 1.58 | 4.87 | 3.92 | 1.27 | 0 | 7.0E−03 | 2.59 | 6.0 |
| 654 | 654_st1 | | | | | | | | | | | | | | | | | | | | | |
| hsa-miR- | hsa-asg- | 6.88 | 5.80 | 6.42 | 6.37 | 0.54 | 100 | 3.21 | 6.25 | 5.09 | 4.52 | 4.45 | 5.20 | 4.59 | 4.21 | 3.65 | 4.58 | 0.89 | 11 | 9.1E−03 | 1.79 | 3.5 |
| 654 | 33_st1 | | | | | | | | | | | | | | | | | | | | | |
| hsa-miR- | hsa-miR- | 10.0 | 8.52 | 9.34 | 9.29 | 0.75 | 100 | 6.40 | 7.30 | 7.22 | 6.96 | 6.63 | 7.66 | 5.73 | 5.86 | 6.60 | 6.71 | 0.65 | 100 | 1.7E−04 | 2.58 | 6.0 |
| 494 | 494_st1 | | | | | | | | | | | | | | | | | | | | | |
| hsa-miR- | hsa- | 9.28 | 7.90 | 8.55 | 8.58 | 0.69 | 100 | 6.83 | 6.55 | 6.85 | 6.43 | 6.38 | 7.10 | 5.40 | 5.79 | 6.89 | 6.47 | 0.55 | 89 | 2.9E−04 | 2.11 | 4.3 |
| 494 | miR61_st2 | | | | | | | | | | | | | | | | | | | | | |
| hsa-asg- | hsa-asg- | 7.60 | 7.93 | 6.79 | 7.44 | 0.58 | 100 | 4.09 | 6.15 | 3.73 | 5.02 | 5.12 | 6.20 | 2.92 | 5.06 | 5.55 | 4.87 | 1.10 | 22 | 3.5E−03 | 2.57 | 5.9 |
| 5005 | 5005_st2 | | | | | | | | | | | | | | | | | | | | | |
| hsa-asg- | hsa-asg- | 6.72 | 5.50 | 5.26 | 5.83 | 0.78 | 100 | 3.07 | 2.54 | 4.81 | 2.42 | 2.53 | 2.77 | 3.17 | 3.91 | 4.16 | 3.27 | 0.84 | 0 | 9.3E−04 | 2.56 | 5.9 |
| 1296 | 1296_st1 | | | | | | | | | | | | | | | | | | | | | |
| hsa- | hsa- | 7.62 | 8.05 | 7.45 | 7.71 | 0.31 | 100 | 6.49 | 6.58 | 3.46 | 5.75 | 5.33 | 6.38 | 4.27 | 4.25 | 3.82 | 5.15 | 1.22 | 33 | 5.9E−03 | 2.56 | 5.9 |
| miR207 | miR207_st1 | | | | | | | | | | | | | | | | | | | | | |
| hsa-asg- | hsa-asg- | 8.97 | 9.47 | 8.89 | 9.11 | 0.32 | 100 | 7.64 | 7.55 | 5.12 | 7.19 | 7.36 | 7.69 | 5.92 | 5.87 | 4.70 | 6.56 | 1.17 | 67 | 4.6E−03 | 2.55 | 5.9 |
| 12172 | 12172_st2 | | | | | | | | | | | | | | | | | | | | | |
| hsa-miR- | hsa-miR- | 10.4 | 8.24 | 9.34 | 9.32 | 1.08 | 100 | 7.33 | 5.89 | 7.21 | 8.24 | 6.45 | 5.41 | 5.19 | 6.07 | 9.36 | 6.79 | 1.37 | 78 | 1.6E−02 | 2.53 | 5.8 |
| 203 | 203_st2 | | | | | | | | | | | | | | | | | | | | | |
| hsa-asg- | hsa-asg- | 5.34 | 4.39 | 4.68 | 4.80 | 0.49 | 67 | 1.65 | 0.95 | 3.79 | 2.33 | 2.69 | 2.35 | 0.35 | 3.20 | 3.25 | 2.29 | 1.12 | 0 | 4.3E−03 | 2.52 | 5.7 |
| 13705 | 13705_st1 | | | | | | | | | | | | | | | | | | | | | |
| hsa-asg- | hsa-asg- | 8.60 | 9.62 | 8.40 | 8.87 | 0.66 | 100 | 6.69 | 7.02 | 5.35 | 6.60 | 7.31 | 6.94 | 5.92 | 5.83 | 5.64 | 6.37 | 0.69 | 67 | 2.6E−04 | 2.51 | 5.7 |
| 9434 | 9434_st2 | | | | | | | | | | | | | | | | | | | | | |
| hsa-asg- | hsa-asg- | 9.84 | 9.97 | 9.75 | 9.85 | 0.11 | 100 | 7.77 | 8.39 | 6.75 | 7.39 | 8.02 | 8.01 | 6.85 | 6.94 | 5.97 | 7.34 | 0.78 | 0 | 2.9E−04 | 2.51 | 5.7 |
| 11165 | 11165_st1 | | | | | | | | | | | | | | | | | | | | | |
| hsa- | hsa-cand138_st1 | 7.07 | 6.45 | 6.13 | 6.55 | 0.48 | 100 | 2.93 | 5.64 | 3.06 | 3.63 | 3.68 | 6.00 | 3.05 | 3.54 | 5.00 | 4.06 | 1.17 | 22 | 5.8E−03 | 2.49 | 5.6 |
| cand138 | | | | | | | | | | | | | | | | | | | | | | |
| hsa-asg- | hsa-asg-10630_st1 | 6.65 | 6.61 | 6.35 | 6.54 | 0.16 | 100 | 4.49 | 5.40 | 3.23 | 3.77 | 4.27 | 5.80 | 3.29 | 3.83 | 2.33 | 4.05 | 1.09 | 0 | 3.3E−03 | 2.49 | 5.6 |
| 10630 | | | | | | | | | | | | | | | | | | | | | | |
| hsa-asg- | hsa-asg- | 9.89 | 9.78 | 9.62 | 9.76 | 0.13 | 100 | 7.21 | 8.52 | 6.68 | 7.00 | 7.93 | 8.11 | 6.22 | 7.10 | 6.83 | 7.29 | 0.74 | 100 | 2.4E−04 | 2.47 | 5.6 |
| 3545 | 3545_st1 | | | | | | | | | | | | | | | | | | | | | |
| hsa-asg- | hsa-asg- | 6.58 | 5.94 | 6.64 | 6.39 | 0.39 | 100 | 5.18 | 4.49 | 4.02 | 1.72 | 3.39 | 2.85 | 3.85 | 5.08 | 4.67 | 3.92 | 1.12 | 11 | 4.5E−03 | 2.47 | 5.6 |
| 9980 | 9980_st1 | | | | | | | | | | | | | | | | | | | | | |
| hsa-asg- | hsa-asg- | 8.06 | 8.18 | 7.65 | 7.96 | 0.27 | 100 | 6.89 | 6.21 | 4.26 | 5.61 | 5.88 | 6.16 | 4.59 | 5.20 | 4.70 | 5.50 | 0.88 | 11 | 8.9E−04 | 2.46 | 5.5 |
| 9201 | 9201_st2 | | | | | | | | | | | | | | | | | | | | | |
| hsa-miR- | hsa-miR- | 10.0 | 8.04 | 9.43 | 9.18 | 1.04 | 100 | 7.17 | 6.85 | 7.35 | 7.13 | 7.43 | 6.56 | 6.29 | 5.93 | 5.81 | 6.72 | 0.61 | 78 | 4.3E−04 | 2.45 | 5.5 |
| 382 | 382_st1 | | | | | | | | | | | | | | | | | | | | | |
| hsa- | hsa- | 9.21 | 10.3 | 10.0 | 9.85 | 0.58 | 67 | 7.56 | 8.28 | 6.14 | 7.20 | 7.97 | 8.19 | 6.60 | 7.58 | 7.11 | 7.40 | 0.72 | 0 | 3.4E−04 | 2.45 | 5.5 |
| miR112 | miR112_st1 | | | | | | | | | | | | | | | | | | | | | |
| hsa-miR- | hsa-miR- | 7.87 | 8.08 | 8.52 | 8.16 | 0.33 | 100 | 6.96 | 5.82 | 5.71 | 6.66 | 5.54 | 4.84 | 5.51 | 5.11 | 5.23 | 5.71 | 0.70 | 33 | 1.9E−04 | 2.45 | 5.5 |
| 215 | 215_st1 | | | | | | | | | | | | | | | | | | | | | |
| hsa- | hsa- | 5.71 | 4.22 | 5.43 | 5.12 | 0.79 | 67 | 2.25 | 1.96 | 3.79 | 3.63 | 2.69 | 2.17 | 3.59 | 1.29 | 2.74 | 2.68 | 0.86 | 0 | 1.4E−03 | 2.44 | 5.4 |
| cand206 | cand206_st1 | | | | | | | | | | | | | | | | | | | | | |
| hsa-asg-14163 | hsa-asg- | 7.40 | 8.81 | 9.03 | 8.41 | 0.89 | 100 | 6.59 | 6.24 | 6.60 | 7.29 | 5.69 | 5.73 | 6.30 | 4.91 | 4.40 | 5.97 | 0.90 | 78 | 2.1E−03 | 2.44 | 5.4 |
| | 14163_st2 | | | | | | | | | | | | | | | | | | | | | |
| hsa-asg- | hsa-asg- | 8.37 | 8.69 | 8.32 | 8.46 | 0.20 | 100 | 6.89 | 6.98 | 5.06 | 5.95 | 6.49 | 7.01 | 4.94 | 6.34 | 4.57 | 6.03 | 0.95 | 67 | 1.6E−03 | 2.43 | 5.4 |
| 6277 | 6277_st2 | | | | | | | | | | | | | | | | | | | | | |
| hsa-asg- | hsa-asg- | 11.1 | 11.2 | 10.9 | 11.11 | 0.17 | 100 | 9.39 | 10.1 | 8.17 | 8.70 | 8.96 | 9.66 | 7.51 | 7.93 | 7.66 | 8.69 | 0.94 | 44 | 1.5E−03 | 2.42 | 5.4 |
| 8542 | 8542_st2 | | | | | | | | | | | | | | | | | | | | | |
| hsa-asg- | hsa-asg- | 7.78 | 7.98 | 7.61 | 7.79 | 0.19 | 100 | 5.45 | 7.03 | 3.96 | 5.50 | 5.53 | 7.12 | 3.68 | 4.89 | 5.12 | 5.36 | 1.17 | 22 | 6.1E−03 | 2.42 | 5.4 |
| 14164 | 14164_st2 | | | | | | | | | | | | | | | | | | | | | |
| hsa-asg- | hsa-asg- | 8.60 | 9.00 | 8.77 | 8.79 | 0.20 | 100 | 6.96 | 7.73 | 5.26 | 6.60 | 7.01 | 7.52 | 5.84 | 6.33 | 4.11 | 6.37 | 1.15 | 78 | 5.6E−03 | 2.42 | 5.3 |
| 4864 | 4864_st1 | | | | | | | | | | | | | | | | | | | | | |
| hsa-asg- | hsa-asg- | 8.50 | 10.3 | 10.7 | 9.86 | 1.20 | 100 | 7.95 | 8.62 | 5.85 | 7.75 | 8.67 | 8.30 | 6.83 | 7.02 | 6.03 | 7.45 | 1.06 | 78 | 7.7E−03 | 2.41 | 5.3 |
| 12356 | 12356_st1 | | | | | | | | | | | | | | | | | | | | | |
| hsa-asg- | hsa-asg- | 8.46 | 8.04 | 8.12 | 8.21 | 0.23 | 100 | 5.18 | 8.00 | 4.58 | 5.43 | 5.79 | 7.67 | 4.27 | 4.98 | 6.24 | 5.79 | 1.30 | 22 | 1.1E−02 | 2.41 | 5.3 |
| 2785 | 2785_st2 | | | | | | | | | | | | | | | | | | | | | |
| hsa-cand22 | hsa- | 7.02 | 8.49 | 8.90 | 8.14 | 0.99 | 100 | 6.14 | 6.20 | 6.43 | 6.81 | 5.35 | 5.37 | 5.82 | 5.67 | 3.77 | 5.73 | 0.88 | 78 | 2.4E−03 | 2.41 | 5.3 |
| | cand22_st2 | | | | | | | | | | | | | | | | | | | | | |
| hsa-asg- | hsa-asg- | 5.34 | 5.35 | 3.99 | 4.89 | 0.78 | 67 | 3.21 | 2.71 | 1.66 | 3.01 | 1.74 | 1.58 | 1.97 | 2.45 | 4.07 | 2.49 | 0.84 | 0 | 1.4E−03 | 2.40 | 5.3 |
| 12016 | 12016_st2 | | | | | | | | | | | | | | | | | | | | | |
| hsa-miR- | hsa-miR- | 6.07 | 3.79 | 4.93 | 4.93 | 1.14 | 67 | 2.25 | 2.87 | 2.66 | 3.40 | 2.19 | 3.26 | 0.91 | 2.27 | 2.92 | 2.53 | 0.75 | 0 | 1.5E−03 | 2.40 | 5.3 |
| 487a | 487a_st2 | | | | | | | | | | | | | | | | | | | | | |
| hsa-miR- | hsa-asg- | 6.26 | 5.45 | 5.82 | 5.85 | 0.40 | 100 | 4.09 | 3.64 | 3.91 | 3.40 | 3.89 | 3.78 | 3.68 | 3.74 | 3.65 | 3.75 | 0.20 | 0 | 2.1E−07 | 2.09 | 4.3 |
| 487a | 6915_st1 | | | | | | | | | | | | | | | | | | | | | |
| hsa-asg- | hsa-asg- | 5.65 | 4.31 | 5.48 | 5.14 | 0.73 | 67 | 2.05 | 3.02 | 3.67 | 2.03 | 2.45 | 2.17 | 1.60 | 2.93 | 4.78 | 2.75 | 0.99 | 0 | 3.4E−03 | 2.40 | 5.3 |
| 3822 | 3822_st2 | | | | | | | | | | | | | | | | | | | | | |
| hsa-asg- | hsa-asg- | 10.0 | 10.3 | 10.1 | 10.16 | 0.16 | 100 | 8.15 | 9.08 | 6.45 | 8.11 | 8.55 | 8.76 | 6.87 | 7.28 | 6.68 | 7.77 | 0.97 | 78 | 2.1E−03 | 2.39 | 5.2 |
| 13083 | 13083_st1 | | | | | | | | | | | | | | | | | | | | | |
| hsa-asg- | hsa-asg- | 9.64 | 10.0 | 9.54 | 9.73 | 0.24 | 100 | 8.08 | 8.38 | 6.09 | 7.77 | 8.09 | 7.82 | 6.62 | 6.78 | 6.41 | 7.34 | 0.86 | 44 | 9.4E−04 | 2.39 | 5.2 |
| 9920 | 9920_st1 | | | | | | | | | | | | | | | | | | | | | |
| hsa- | hsa- | 5.49 | 4.22 | 5.59 | 5.10 | 0.77 | 67 | 3.07 | 1.96 | 2.86 | 3.01 | 2.28 | 2.69 | 2.92 | 2.08 | 3.53 | 2.71 | 0.51 | 0 | 9.4E−05 | 2.39 | 5.2 |
| cand852 | cand852_st2 | | | | | | | | | | | | | | | | | | | | | |
| hsa-asg- | hsa-asg- | 5.34 | 4.31 | 5.09 | 4.91 | 0.54 | 67 | 2.43 | 2.71 | 1.92 | 1.93 | 2.01 | 2.53 | 2.92 | 2.62 | 3.65 | 2.53 | 0.55 | 0 | 6.9E−05 | 2.39 | 5.2 |
| 5119 | 5119_st1 | | | | | | | | | | | | | | | | | | | | | |
| hsa-miR- | hsa-miR- | 11.4 | 11.7 | 11.9 | 11.72 | 0.22 | 100 | 10.9 | 9.25 | 9.49 | 10.8 | 10.1 | 8.36 | 10.8 | 6.81 | 7.36 | 9.33 | 1.54 | 100 | 2.7E−02 | 2.38 | 5.2 |
| 224 | 224_st2 | | | | | | | | | | | | | | | | | | | | | |
| hsa-miR- | hsa-asg- | 11.6 | 11.7 | 11.9 | 11.81 | 0.16 | 100 | 11.0 | 9.30 | 9.68 | 10.9 | 10.3 | 8.59 | 11.0 | 7.00 | 7.45 | 9.49 | 1.53 | 100 | 2.9E−02 | 2.33 | 5.0 |
| 224 | 14247_st1 | | | | | | | | | | | | | | | | | | | | | |
| hsa-asg- | hsa-asg- | 8.33 | 9.04 | 9.24 | 8.87 | 0.48 | 33 | 7.01 | 7.33 | 4.93 | 6.26 | 7.34 | 7.13 | 5.91 | 6.51 | 6.00 | 6.49 | 0.81 | 0 | 7.7E−04 | 2.38 | 5.2 |
| 8293 | 8293_st2 | | | | | | | | | | | | | | | | | | | | | |
| hsa-miR- | hsa-miR- | 5.42 | 4.66 | 4.75 | 4.94 | 0.41 | 33 | 2.05 | 2.16 | 4.68 | 2.69 | 2.28 | 1.97 | 1.60 | 3.07 | 2.54 | 2.56 | 0.90 | 0 | 1.5E−03 | 2.38 | 5.2 |
| 518f* | 518f-_st2 | | | | | | | | | | | | | | | | | | | | | |
| hsa-asg- | hsa-asg- | 10.2 | 10.3 | 9.92 | 10.14 | 0.20 | 100 | 8.55 | 8.88 | 6.92 | 7.90 | 7.99 | 8.48 | 6.88 | 7.29 | 6.98 | 7.76 | 0.77 | 100 | 4.4E−04 | 2.38 | 5.2 |
| 7292 | 7292_st1 | | | | | | | | | | | | | | | | | | | | | |
| hsa-asg- | hsa-asg- | 5.30 | 6.41 | 5.70 | 5.80 | 0.56 | 33 | 3.45 | 4.58 | 2.31 | 4.84 | 3.10 | 3.59 | 2.92 | 2.70 | 3.46 | 3.44 | 0.83 | 0 | 1.0E−03 | 2.37 | 5.2 |
| 7550 | 7550_st1 | | | | | | | | | | | | | | | | | | | | | |
| hsa-asg- | hsa-asg- | 7.81 | 8.51 | 8.39 | 8.24 | 0.38 | 100 | 5.87 | 6.55 | 4.78 | 6.21 | 6.10 | 6.92 | 4.90 | 5.92 | 5.64 | 5.88 | 0.70 | 33 | 2.7E−04 | 2.36 | 5.1 |
| 9053 | 9053_st1 | | | | | | | | | | | | | | | | | | | | | |
| hsa-asg- | hsa-asg- | 7.45 | 8.01 | 7.80 | 7.75 | 0.28 | 100 | 5.29 | 7.06 | 5.04 | 5.08 | 5.33 | 5.98 | 4.38 | 5.15 | 5.42 | 5.41 | 0.74 | 33 | 4.1E−04 | 2.34 | 5.1 |
| 7704 | 7704_st2 | | | | | | | | | | | | | | | | | | | | | |
| hsa-miR- | hsa-asg- | 6.64 | 4.55 | 5.36 | 5.52 | 1.05 | 67 | 1.65 | 3.16 | 3.79 | 3.73 | 4.42 | 2.35 | 3.68 | 2.78 | 3.09 | 3.18 | 0.84 | 0 | 2.7E−03 | 2.33 | 5.0 |
| 329 | 13589_st2 | | | | | | | | | | | | | | | | | | | | | |
| hsa-asg- | hsa-asg- | 6.30 | 6.39 | 5.90 | 6.20 | 0.26 | 67 | 4.02 | 5.45 | 2.96 | 3.95 | 4.85 | 5.40 | 1.97 | 2.85 | 3.32 | 3.86 | 1.20 | 0 | 9.0E−03 | 2.33 | 5.0 |
| 2226 | 2226_st1 | | | | | | | | | | | | | | | | | | | | | |
| hsa-asg- | hsa-asg- | 10.2 | 10.5 | 10.0 | 10.27 | 0.22 | 100 | 8.86 | 9.33 | 7.17 | 7.92 | 8.37 | 8.86 | 6.91 | 7.43 | 6.61 | 7.94 | 0.97 | 22 | 2.4E−03 | 2.33 | 5.0 |
| 1751 | 1751_st2 | | | | | | | | | | | | | | | | | | | | | |
| hsa-asg- | hsa-asg- | 7.43 | 7.99 | 7.44 | 7.62 | 0.32 | 100 | 6.34 | 6.79 | 3.91 | 5.35 | 5.58 | 5.65 | 3.77 | 5.11 | 5.23 | 5.30 | 0.99 | 22 | 3.0E−03 | 2.32 | 5.0 |
| 11235 | 11235_st2 | | | | | | | | | | | | | | | | | | | | | |
| hsa-asg- | hsa-asg- | 6.68 | 7.07 | 6.48 | 6.74 | 0.30 | 100 | 5.11 | 5.32 | 5.30 | 5.02 | 5.43 | 4.55 | 3.59 | 2.70 | 2.83 | 4.43 | 1.10 | 0 | 5.6E−03 | 2.31 | 5.0 |
| 14015 | 14015_st1 | | | | | | | | | | | | | | | | | | | | | |
| hsa-asg- | hsa-asg- | 5.46 | 5.53 | 5.09 | 5.36 | 0.24 | 33 | 1.85 | 4.49 | 2.86 | 2.03 | 2.90 | 4.18 | 1.79 | 3.20 | 4.16 | 3.05 | 1.04 | 0 | 4.1E−03 | 2.31 | 5.0 |
| 13665 | 13665_st2 | | | | | | | | | | | | | | | | | | | | | |
| hsa-asg- | hsa-asg- | 8.88 | 9.10 | 8.80 | 8.93 | 0.16 | 100 | 7.16 | 8.01 | 5.35 | 6.84 | 6.84 | 7.40 | 6.05 | 5.68 | 6.24 | 6.62 | 0.86 | 67 | 1.1E−03 | 2.31 | 4.9 |
| 3230 | 3230_st1 | | | | | | | | | | | | | | | | | | | | | |
| hsa-miR- | hsa-miR- | 6.91 | 7.19 | 7.10 | 7.07 | 0.14 | 100 | 5.29 | 5.92 | 2.54 | 5.43 | 5.14 | 5.90 | 3.77 | 4.71 | 4.20 | 4.77 | 1.10 | 0 | 5.8E−03 | 2.30 | 4.9 |
| 557 | 557_st1 | | | | | | | | | | | | | | | | | | | | | |
| hsa-asg- | hsa-asg- | 8.34 | 7.05 | 7.95 | 7.78 | 0.66 | 100 | 6.06 | 5.72 | 5.28 | 6.77 | 6.26 | 5.43 | 5.46 | 4.21 | 4.16 | 5.48 | 0.87 | 44 | 2.0E−03 | 2.30 | 4.9 |
| 14176 | 14176_st1 | | | | | | | | | | | | | | | | | | | | | |
| hsa-asg- | hsa-asg- | 6.92 | 6.96 | 7.32 | 7.07 | 0.22 | 100 | 6.30 | 5.78 | 4.26 | 4.26 | 5.12 | 5.09 | 4.54 | 4.25 | 3.32 | 4.77 | 0.90 | 22 | 1.7E−03 | 2.30 | 4.9 |
| 8902 | 8902_st2 | | | | | | | | | | | | | | | | | | | | | |
| hsa-asg- | hsa-asg- | 8.34 | 8.57 | 8.23 | 8.38 | 0.17 | 100 | 6.12 | 7.47 | 4.93 | 5.83 | 6.23 | 7.63 | 4.90 | 5.32 | 6.48 | 6.10 | 0.99 | 67 | 3.2E−03 | 2.28 | 4.9 |
| 10030 | 10030_st2 | | | | | | | | | | | | | | | | | | | | | |
| hsa-asg- | hsa-asg- | 5.51 | 3.85 | 5.06 | 4.81 | 0.86 | 67 | 2.78 | 2.16 | 4.02 | 1.72 | 2.19 | 2.35 | 0.35 | 3.20 | 3.97 | 2.53 | 1.14 | 0 | 1.0E−02 | 2.28 | 4.9 |
| 10247 | 10247_st1 | | | | | | | | | | | | | | | | | | | | | |
| hsa-asg- | hsa-asg- | 6.89 | 7.37 | 7.21 | 7.16 | 0.24 | 100 | 4.37 | 5.71 | 5.21 | 4.49 | 5.36 | 5.03 | 3.85 | 4.89 | 5.07 | 4.89 | 0.57 | 0 | 6.1E−05 | 2.27 | 4.8 |
| 11877 | 11877_st1 | | | | | | | | | | | | | | | | | | | | | |
| hsa-asg- | hsa-asg- | 9.29 | 9.62 | 9.47 | 9.46 | 0.16 | 67 | 7.76 | 8.47 | 6.19 | 7.32 | 8.15 | 8.18 | 6.48 | 6.67 | 5.49 | 7.19 | 1.03 | 0 | 4.2E−03 | 2.27 | 4.8 |
| 1273 | 1273_st2 | | | | | | | | | | | | | | | | | | | | | |
| hsa-asg- | hsa-asg- | 6.26 | 6.69 | 6.24 | 6.40 | 0.26 | 100 | 3.33 | 5.08 | 4.02 | 4.40 | 3.28 | 4.70 | 3.59 | 3.54 | 5.27 | 4.13 | 0.76 | 0 | 5.8E−04 | 2.27 | 4.8 |
| 3646 | 3646_st1 | | | | | | | | | | | | | | | | | | | | | |
| hsa-asg- | hsa-asg- | 6.68 | 6.65 | 6.65 | 6.66 | 0.02 | 100 | 4.94 | 5.67 | 3.23 | 4.33 | 4.74 | 5.54 | 3.50 | 3.74 | 3.87 | 4.40 | 0.88 | 11 | 1.5E−03 | 2.27 | 4.8 |
| 328 | 328_st1 | | | | | | | | | | | | | | | | | | | | | |
| hsa-asg- | hsa-asg- | 6.20 | 4.35 | 5.99 | 5.52 | 1.01 | 67 | 3.33 | 3.16 | 3.54 | 2.51 | 2.53 | 3.26 | 2.64 | 3.20 | 5.09 | 3.25 | 0.78 | 0 | 2.2E−03 | 2.27 | 4.8 |
| 10131 | 10131_st2 | | | | | | | | | | | | | | | | | | | | | |
| hsa-asg- | hsa-asg- | 10.0 | 10.3 | 10.0 | 10.15 | 0.17 | 100 | 8.63 | 9.25 | 6.50 | 8.17 | 8.50 | 8.84 | 7.09 | 7.33 | 6.65 | 7.88 | 1.01 | 100 | 3.8E−03 | 2.26 | 4.8 |
| 5189 | 5189_st2 | | | | | | | | | | | | | | | | | | | | | |
| hsa-asg- | hsa-asg- | 8.59 | 9.07 | 8.56 | 8.74 | 0.29 | 100 | 6.86 | 7.13 | 5.69 | 6.75 | 7.36 | 7.65 | 5.29 | 5.83 | 5.88 | 6.49 | 0.84 | 67 | 1.2E−03 | 2.25 | 4.8 |
| 8683 | 8683_st1 | | | | | | | | | | | | | | | | | | | | | |
| hsa-asg- | hsa-asg- | 8.40 | 8.87 | 8.32 | 8.53 | 0.29 | 100 | 7.02 | 7.61 | 5.01 | 6.55 | 6.98 | 7.28 | 5.43 | 5.43 | 5.25 | 6.29 | 1.00 | 56 | 3.9E−03 | 2.25 | 4.7 |
| 13559 | 13559_st2 | | | | | | | | | | | | | | | | | | | | | |
| hsa-asg- | hsa-asg- | 7.87 | 7.76 | 7.67 | 7.76 | 0.10 | 100 | 4.81 | 8.13 | 3.54 | 5.08 | 5.33 | 8.28 | 4.82 | 4.91 | 4.89 | 5.53 | 1.59 | 22 | 4.0E−02 | 2.23 | 4.7 |
| 3988 | 3988_st2 | | | | | | | | | | | | | | | | | | | | | |
| hsa-asg- | hsa-asg- | 6.16 | 6.12 | 5.77 | 6.01 | 0.21 | 100 | 2.93 | 5.55 | 2.66 | 3.01 | 3.49 | 6.24 | 2.92 | 3.64 | 3.65 | 3.79 | 1.26 | 22 | 1.4E−02 | 2.23 | 4.7 |
| 4199 | 4199_st1 | | | | | | | | | | | | | | | | | | | | | |
| hsa-asg- | hsa-asg- | 9.79 | 10.0 | 9.84 | 9.91 | 0.16 | 100 | 8.41 | 8.76 | 6.23 | 7.51 | 8.14 | 8.90 | 6.31 | 7.53 | 7.32 | 7.68 | 0.97 | 11 | 3.3E−03 | 2.23 | 4.7 |
| 4869 | 4869_st1 | | | | | | | | | | | | | | | | | | | | | |
| hsa-miR-96 | hsa-miR- | 6.30 | 4.66 | 5.52 | 5.50 | 0.82 | 67 | 4.99 | 3.42 | 3.06 | 3.01 | 4.11 | 2.85 | 3.05 | 1.88 | 3.09 | 3.27 | 0.86 | 11 | 2.9E−03 | 2.22 | 4.7 |
| | 96_st1 | | | | | | | | | | | | | | | | | | | | | |
| hsa-asg- | hsa-asg- | 5.42 | 6.31 | 5.95 | 5.89 | 0.45 | 100 | 1.85 | 5.82 | 1.92 | 3.40 | 2.76 | 5.68 | 3.68 | 3.07 | 4.84 | 3.67 | 1.48 | 11 | 3.2E−02 | 2.22 | 4.7 |
| 8792 | 8792_st1 | | | | | | | | | | | | | | | | | | | | | |
| hsa-asg- | hsa-asg- | 6.13 | 6.09 | 6.31 | 6.18 | 0.12 | 100 | 3.07 | 5.49 | 3.06 | 3.77 | 4.14 | 5.24 | 3.93 | 2.45 | 4.47 | 3.96 | 1.01 | 0 | 4.3E−03 | 2.22 | 4.7 |
| 1797 | 1797_st2 | | | | | | | | | | | | | | | | | | | | | |
| hsa-asg- | hsa-asg- | 7.41 | 7.64 | 7.35 | 7.47 | 0.15 | 100 | 5.80 | 6.42 | 4.26 | 4.60 | 5.42 | 6.01 | 4.73 | 4.38 | 5.61 | 5.25 | 0.78 | 0 | 7.6E−04 | 2.22 | 4.7 |
| 7228 | 7228_st1 | | | | | | | | | | | | | | | | | | | | | |
| hsa-asg- | hsa-asg- | 9.92 | 10.3 | 9.89 | 10.04 | 0.24 | 100 | 8.37 | 8.96 | 6.33 | 8.10 | 8.40 | 8.58 | 7.04 | 7.43 | 7.18 | 7.82 | 0.86 | 100 | 1.6E−03 | 2.22 | 4.6 |
| 960 | 960_st1 | | | | | | | | | | | | | | | | | | | | | |
| hsa-asg- | hsa-asg- | 6.53 | 6.87 | 6.61 | 6.67 | 0.18 | 100 | 4.43 | 5.77 | 4.12 | 3.63 | 5.05 | 5.30 | 3.50 | 3.74 | 4.54 | 4.45 | 0.79 | 22 | 9.0E−04 | 2.22 | 4.6 |
| 6813 | 6813_st2 | | | | | | | | | | | | | | | | | | | | | |
| hsa-asg- | hsa-asg- | 8.62 | 9.26 | 8.95 | 8.95 | 0.32 | 100 | 7.09 | 7.60 | 5.43 | 6.98 | 7.50 | 7.39 | 5.86 | 6.94 | 5.77 | 6.73 | 0.82 | 78 | 1.2E−03 | 2.22 | 4.6 |
| 8305 | 8305_st2 | | | | | | | | | | | | | | | | | | | | | |
| hsa-miR- | hsa-miR- | 5.93 | 4.35 | 4.59 | 4.96 | 0.85 | 33 | 3.07 | 2.87 | 2.18 | 3.91 | 2.61 | 1.78 | 2.15 | 3.20 | 2.92 | 2.74 | 0.65 | 0 | 7.3E−04 | 2.22 | 4.6 |
| 200a* | 200a-_st2 | | | | | | | | | | | | | | | | | | | | | |
| hsa-miR- | hsa-miR- | 7.12 | 3.96 | 5.88 | 5.65 | 1.59 | 67 | 3.76 | 3.02 | 4.61 | 3.28 | 4.58 | 2.85 | 2.78 | 3.32 | 2.74 | 3.44 | 0.73 | 0 | 6.3E−03 | 2.21 | 4.6 |
| 329 | 329_st1 | | | | | | | | | | | | | | | | | | | | | |
| hsa-miR- | hsa-asg- | 6.63 | 4.12 | 5.52 | 5.42 | 1.26 | 67 | 4.09 | 2.87 | 4.21 | 3.40 | 4.24 | 3.48 | 4.00 | 2.62 | 3.53 | 3.61 | 0.59 | 0 | 5.2E−03 | 1.82 | 3.5 |
| 329 | 13204_st2 | | | | | | | | | | | | | | | | | | | | | |
| hsa-asg- | hsa-asg- | 7.79 | 8.09 | 7.48 | 7.78 | 0.31 | 100 | 5.32 | 6.90 | 4.43 | 5.37 | 5.27 | 6.38 | 5.25 | 5.71 | 5.55 | 5.57 | 0.71 | 22 | 4.7E−04 | 2.21 | 4.6 |
| 11940 | 11940_st1 | | | | | | | | | | | | | | | | | | | | | |
| hsa-miR- | hsa-miR- | 8.85 | 7.01 | 7.91 | 7.92 | 0.92 | 100 | 5.80 | 6.16 | 5.53 | 5.92 | 5.78 | 3.48 | 5.82 | 5.72 | 7.23 | 5.72 | 0.97 | 89 | 6.3E−03 | 2.21 | 4.6 |
| 424 | 424_st1 | | | | | | | | | | | | | | | | | | | | | |
| hsa-miR- | hsa-miR- | 7.10 | 4.92 | 5.91 | 5.97 | 1.09 | 67 | 4.24 | 2.71 | 2.86 | 3.91 | 3.63 | 4.03 | 4.20 | 4.47 | 4.07 | 3.79 | 0.61 | 0 | 1.2E−03 | 2.18 | 4.5 |
| 450 | 450_st2 | | | | | | | | | | | | | | | | | | | | | |
| hsa-miR- | hsa-asg- | 5.90 | 4.12 | 4.68 | 4.90 | 0.91 | 33 | 3.56 | 2.16 | 2.43 | 3.01 | 2.53 | 3.13 | 2.92 | 2.93 | 2.74 | 2.82 | 0.41 | 0 | 2.1E−04 | 2.08 | 4.2 |
| 450 | 14228_st2 | | | | | | | | | | | | | | | | | | | | | |
| hsa-asg- | hsa-asg- | 10.3 | 10.4 | 10.0 | 10.30 | 0.24 | 100 | 8.84 | 9.32 | 7.09 | 8.22 | 8.76 | 9.20 | 7.09 | 7.63 | 6.86 | 8.11 | 0.97 | 100 | 3.7E−03 | 2.18 | 4.5 |
| 5810 | 5810_st2 | | | | | | | | | | | | | | | | | | | | | |
| hsa-asg- | hsa-asg- | 7.21 | 7.59 | 7.56 | 7.45 | 0.21 | 100 | 5.80 | 5.91 | 4.93 | 5.25 | 6.11 | 6.04 | 4.14 | 4.91 | 4.32 | 5.27 | 0.74 | 33 | 6.4E−04 | 2.18 | 4.5 |
| 6068 | 6068_st2 | | | | | | | | | | | | | | | | | | | | | |
| hsa-asg- | hsa-asg- | 10.6 | 10.7 | 10.6 | 10.66 | 0.07 | 100 | 9.15 | 9.59 | 7.72 | 8.56 | 8.81 | 8.90 | 7.84 | 7.84 | 7.91 | 8.48 | 0.68 | 33 | 3.1E−04 | 2.18 | 4.5 |
| 8541 | 8541_st1 | | | | | | | | | | | | | | | | | | | | | |
| hsa-miR- | hsa-miR- | 6.02 | 3.85 | 5.12 | 4.99 | 1.09 | 33 | 2.43 | 2.71 | 4.54 | 2.93 | 4.21 | 2.35 | 1.60 | 1.68 | 2.92 | 2.82 | 1.00 | 0 | 9.6E−03 | 2.17 | 4.5 |
| 433 | 433_st2 | | | | | | | | | | | | | | | | | | | | | |
| hsa-asg- | hsa-asg- | 5.83 | 6.63 | 6.23 | 6.23 | 0.40 | 100 | 3.85 | 5.04 | 3.91 | 3.63 | 4.39 | 3.95 | 1.79 | 4.58 | 5.42 | 4.06 | 1.04 | 0 | 6.3E−03 | 2.17 | 4.5 |
| 6076 | 6076_st2 | | | | | | | | | | | | | | | | | | | | | |
| hsa-asg- | hsa-asg- | 9.39 | 9.39 | 9.50 | 9.42 | 0.06 | 100 | 8.24 | 8.13 | 6.97 | 7.98 | 6.55 | 7.56 | 6.68 | 6.07 | 7.12 | 7.25 | 0.77 | 100 | 7.8E−04 | 2.17 | 4.5 |
| 13646 | 13646_st1 | | | | | | | | | | | | | | | | | | | | | |
| hsa-asg- | hsa-asg- | 9.00 | 9.47 | 8.84 | 9.10 | 0.33 | 100 | 7.74 | 7.91 | 5.83 | 7.23 | 7.66 | 7.97 | 5.93 | 6.67 | 5.56 | 6.94 | 0.96 | 33 | 4.1E−03 | 2.16 | 4.5 |
| 3933 | 3933_st1 | | | | | | | | | | | | | | | | | | | | | |
| hsa-asg- | hsa-asg- | 6.24 | 6.30 | 6.15 | 6.23 | 0.07 | 67 | 4.31 | 5.21 | 3.14 | 3.87 | 3.22 | 5.27 | 3.17 | 4.76 | 3.71 | 4.07 | 0.85 | 0 | 1.7E−03 | 2.16 | 4.5 |
| 12526 | 12526_st1 | | | | | | | | | | | | | | | | | | | | | |
| hsa-asg- | hsa-asg- | 6.36 | 6.56 | 5.77 | 6.23 | 0.41 | 100 | 2.25 | 5.79 | 3.67 | 3.15 | 3.85 | 5.65 | 3.93 | 3.91 | 4.47 | 4.07 | 1.12 | 11 | 1.0E−02 | 2.15 | 4.4 |
| 8424 | 8424_st2 | | | | | | | | | | | | | | | | | | | | | |
| hsa-asg- | hsa-asg- | 7.60 | 7.99 | 7.49 | 7.69 | 0.26 | 100 | 5.62 | 6.43 | 4.43 | 5.75 | 6.04 | 6.70 | 4.33 | 5.58 | 5.02 | 5.54 | 0.82 | 11 | 1.5E−03 | 2.15 | 4.4 |
| 1898 | 1898_st1 | | | | | | | | | | | | | | | | | | | | | |
| hsa-miR- | hsa-miR- | 5.88 | 4.51 | 4.83 | 5.07 | 0.72 | 33 | 3.56 | 2.71 | 5.04 | 2.69 | 1.55 | 2.99 | 3.17 | 2.62 | 2.10 | 2.94 | 0.98 | 0 | 6.4E−03 | 2.14 | 4.4 |
| 526c | 526c_st1 | | | | | | | | | | | | | | | | | | | | | |
| hsa-asg- | hsa-asg- | 9.75 | 9.96 | 9.32 | 9.68 | 0.33 | 100 | 8.50 | 8.52 | 6.61 | 7.52 | 8.33 | 8.17 | 6.75 | 6.82 | 6.70 | 7.55 | 0.84 | 100 | 1.8E−03 | 2.13 | 4.4 |
| 6948 | 6948_st2 | | | | | | | | | | | | | | | | | | | | | |
| hsa-asg- | hsa-asg- | 6.02 | 6.10 | 5.89 | 6.01 | 0.10 | 100 | 4.37 | 5.91 | 2.18 | 3.34 | 4.70 | 5.27 | 1.60 | 3.54 | 3.97 | 3.88 | 1.39 | 11 | 2.8E−02 | 2.13 | 4.4 |
| 2471 | 2471_st1 | | | | | | | | | | | | | | | | | | | | | |
| hsa-asg- | hsa-asg- | 9.83 | 9.82 | 10.2 | 9.97 | 0.26 | 100 | 9.05 | 8.95 | 7.03 | 8.66 | 7.51 | 8.06 | 7.19 | 6.23 | 7.94 | 7.85 | 0.95 | 100 | 3.9E−03 | 2.13 | 4.4 |
| 13258 | 13258_st2 | | | | | | | | | | | | | | | | | | | | | |
| hsa-asg- | hsa-asg- | 3.52 | 5.93 | 6.59 | 5.35 | 1.61 | 33 | 3.21 | 4.33 | 3.31 | 3.28 | 3.49 | 2.92 | 2.15 | 2.36 | 3.92 | 3.22 | 0.69 | 0 | 7.2E−03 | 2.13 | 4.4 |
| 3743 | 3743_st1 | | | | | | | | | | | | | | | | | | | | | |
| hsa-asg- | hsa-asg- | 5.03 | 7.68 | 7.99 | 6.90 | 1.62 | 67 | 5.18 | 5.62 | 4.34 | 5.21 | 5.43 | 5.05 | 3.50 | 4.44 | 4.20 | 4.78 | 0.69 | 0 | 7.5E−03 | 2.13 | 4.4 |
| 3009 | 3009_st1 | | | | | | | | | | | | | | | | | | | | | |
| hsa-asg- | hsa-asg- | 7.86 | 8.22 | 8.19 | 8.09 | 0.20 | 100 | 5.18 | 7.62 | 4.17 | 5.50 | 6.04 | 7.46 | 5.51 | 5.24 | 6.97 | 5.96 | 1.16 | 33 | 1.2E−02 | 2.13 | 4.4 |
| 9186 | 9186_st1 | | | | | | | | | | | | | | | | | | | | | |
| hsa-asg- | hsa-asg- | 6.04 | 4.51 | 5.55 | 5.37 | 0.78 | 67 | 3.33 | 4.08 | 2.86 | 3.01 | 2.90 | 3.26 | 2.78 | 2.78 | 4.16 | 3.24 | 0.53 | 0 | 3.0E−04 | 2.13 | 4.4 |
| 8174 | 8174_st1 | | | | | | | | | | | | | | | | | | | | | |
| hsa-asg- | hsa-asg- | 8.38 | 9.72 | 10.0 | 9.38 | 0.88 | 100 | 8.27 | 7.65 | 5.88 | 6.64 | 8.43 | 8.11 | 7.07 | 7.28 | 5.93 | 7.25 | 0.96 | 78 | 7.0E−03 | 2.12 | 4.4 |
| 1196 | 1196_st1 | | | | | | | | | | | | | | | | | | | | | |
| hsa-asg- | hsa-asg- | 6.85 | 7.13 | 6.61 | 6.86 | 0.26 | 100 | 5.07 | 6.19 | 3.73 | 4.19 | 5.54 | 5.17 | 3.68 | 3.78 | 5.33 | 4.74 | 0.92 | 11 | 3.2E−03 | 2.12 | 4.4 |
| 8079 | 8079_st1 | | | | | | | | | | | | | | | | | | | | | |
| hsa-asg- | hsa-asg- | 9.53 | 9.34 | 9.23 | 9.37 | 0.15 | 67 | 6.21 | 9.20 | 6.16 | 7.11 | 6.78 | 8.79 | 5.67 | 7.34 | 7.94 | 7.25 | 1.21 | 11 | 1.4E−02 | 2.12 | 4.4 |
| 6957 | 6957_st1 | | | | | | | | | | | | | | | | | | | | | |
| hsa- | hsa- | 6.70 | 7.38 | 7.04 | 7.04 | 0.34 | 100 | 5.68 | 5.81 | 2.96 | 5.17 | 5.87 | 5.80 | 4.38 | 4.11 | 4.50 | 4.92 | 1.00 | 11 | 5.8E−03 | 2.12 | 4.3 |
| cand902 | cand902_st1 | | | | | | | | | | | | | | | | | | | | | |
| hsa-asg- | hsa-asg- | 10.5 | 10.3 | 10.2 | 10.38 | 0.16 | 100 | 6.52 | 10.0 | 6.81 | 7.19 | 8.44 | 10.5 | 6.86 | 8.30 | 9.63 | 8.26 | 1.52 | 100 | 4.1E−02 | 2.12 | 4.3 |
| 3383 | 3383_st1 | | | | | | | | | | | | | | | | | | | | | |
| hsa-asg- | hsa-asg- | 8.90 | 9.07 | 8.79 | 8.92 | 0.14 | 100 | 6.85 | 7.86 | 5.72 | 6.82 | 7.10 | 7.84 | 6.18 | 6.12 | 6.82 | 6.81 | 0.73 | 89 | 7.2E−04 | 2.11 | 4.3 |
| 7654 | 7654_st2 | | | | | | | | | | | | | | | | | | | | | |
| hsa-asg- | hsa-asg- | 9.32 | 9.63 | 9.38 | 9.45 | 0.17 | 100 | 8.45 | 8.31 | 6.17 | 7.81 | 8.24 | 8.24 | 6.49 | 6.84 | 5.48 | 7.34 | 1.11 | 89 | 9.8E−03 | 2.11 | 4.3 |
| 5423 | 5423_st2 | | | | | | | | | | | | | | | | | | | | | |
| hsa-asg- | hsa-asg- | 6.02 | 6.49 | 5.93 | 6.15 | 0.30 | 100 | 4.02 | 5.55 | 3.39 | 3.77 | 3.85 | 5.20 | 2.92 | 3.99 | 3.65 | 4.04 | 0.83 | 11 | 1.9E−03 | 2.11 | 4.3 |
| 9099 | 9099_st2 | | | | | | | | | | | | | | | | | | | | | |
| hsa-miR- | hsa-miR- | 6.66 | 5.68 | 6.94 | 6.43 | 0.66 | 100 | 5.83 | 3.53 | 4.21 | 4.99 | 4.63 | 3.95 | 4.27 | 3.20 | 4.40 | 4.33 | 0.78 | 11 | 1.9E−03 | 2.09 | 4.3 |
| 154* | 154-_st2 | | | | | | | | | | | | | | | | | | | | | |
| hsa-miR- | hsa-miR- | 5.29 | 4.76 | 4.64 | 4.89 | 0.34 | 100 | 2.25 | 3.16 | 3.06 | 3.40 | 1.83 | 2.99 | 3.05 | 2.93 | 2.54 | 2.80 | 0.50 | 0 | 5.6E−05 | 2.09 | 4.3 |
| 520g | 520g_st1 | | | | | | | | | | | | | | | | | | | | | |
| hsa-asg- | hsa-asg- | 10.2 | 10.7 | 10.3 | 10.43 | 0.24 | 100 | 8.94 | 9.48 | 7.27 | 8.69 | 9.30 | 9.16 | 7.67 | 7.84 | 6.85 | 8.36 | 0.96 | 100 | 4.9E−03 | 2.08 | 4.2 |
| 388 | 388_st1 | | | | | | | | | | | | | | | | | | | | | |
| hsa-asg- | hsa-asg- | 6.46 | 5.97 | 6.50 | 6.31 | 0.30 | 100 | 4.43 | 5.12 | 4.02 | 3.21 | 4.39 | 4.18 | 4.14 | 4.21 | 4.40 | 4.23 | 0.50 | 0 | 5.2E−05 | 2.08 | 4.2 |
| 1596 | 1596_st2 | | | | | | | | | | | | | | | | | | | | | |
| hsa- | hsa- | 8.55 | 9.43 | 9.42 | 9.13 | 0.50 | 67 | 8.30 | 7.44 | 5.89 | 7.66 | 8.25 | 7.44 | 6.15 | 7.29 | 5.09 | 7.06 | 1.10 | 44 | 1.1E−02 | 2.07 | 4.2 |
| cand710 | cand710_st2 | | | | | | | | | | | | | | | | | | | | | |
| hsa-miR- | hsa-miR- | 7.34 | 7.56 | 7.24 | 7.38 | 0.16 | 100 | 5.39 | 6.49 | 4.72 | 4.19 | 4.93 | 6.34 | 3.93 | 5.58 | 6.21 | 5.31 | 0.94 | 33 | 4.1E−03 | 2.07 | 4.2 |
| 612 | 612_st1 | | | | | | | | | | | | | | | | | | | | | |
| hsa-asg- | hsa-asg- | 8.98 | 9.28 | 8.83 | 9.03 | 0.23 | 67 | 7.58 | 8.15 | 6.21 | 6.89 | 7.41 | 7.58 | 6.25 | 6.77 | 5.78 | 6.96 | 0.78 | 33 | 1.3E−03 | 2.07 | 4.2 |
| 9453 | 9453_st2 | | | | | | | | | | | | | | | | | | | | | |
| hsa-asg- | hsa-asg- | 7.75 | 8.01 | 7.90 | 7.89 | 0.13 | 100 | 5.68 | 6.79 | 5.60 | 5.65 | 5.88 | 6.62 | 4.94 | 5.88 | 5.31 | 5.82 | 0.58 | 44 | 1.4E−04 | 2.07 | 4.2 |
| 12376 | 12376_st2 | | | | | | | | | | | | | | | | | | | | | |
| hsa-asg- | hsa-asg- | 5.31 | 5.92 | 5.31 | 5.51 | 0.35 | 33 | 3.76 | 4.37 | 3.79 | 3.34 | 4.00 | 4.37 | 2.78 | 2.08 | 2.54 | 3.45 | 0.82 | 0 | 2.0E−03 | 2.07 | 4.2 |
| 5889 | 5889_st2 | | | | | | | | | | | | | | | | | | | | | |
| hsa-asg- | hsa-asg- | 9.56 | 10.0 | 9.79 | 9.80 | 0.25 | 100 | 8.31 | 8.96 | 6.03 | 7.91 | 8.79 | 8.82 | 6.96 | 7.29 | 6.55 | 7.74 | 1.08 | 11 | 9.5E−03 | 2.06 | 4.2 |
| 3450 | 3450_st2 | | | | | | | | | | | | | | | | | | | | | |
| hsa-asg- | hsa-asg- | 6.47 | 8.99 | 9.50 | 8.32 | 1.62 | 33 | 6.42 | 6.94 | 4.61 | 6.58 | 7.81 | 7.05 | 6.37 | 5.29 | 5.23 | 6.25 | 1.02 | 11 | 2.4E−02 | 2.06 | 4.2 |
| 9512 | 9512_st1 | | | | | | | | | | | | | | | | | | | | | |
| hsa-asg- | hsa-asg- | 9.46 | 9.77 | 9.37 | 9.53 | 0.21 | 100 | 8.52 | 8.30 | 6.62 | 7.71 | 8.01 | 8.42 | 6.87 | 7.09 | 5.69 | 7.47 | 0.96 | 0 | 5.1E−03 | 2.06 | 4.2 |
| 4903 | 4903_st2 | | | | | | | | | | | | | | | | | | | | | |
| hsa-asg- | hsa-asg- | 6.44 | 6.60 | 6.00 | 6.35 | 0.31 | 33 | 3.33 | 5.83 | 4.26 | 2.85 | 3.85 | 5.32 | 4.14 | 4.66 | 4.43 | 4.30 | 0.92 | 0 | 4.2E−03 | 2.05 | 4.1 |
| 6416 | 6416_st1 | | | | | | | | | | | | | | | | | | | | | |
| hsa-asg- | hsa-asg- | 10.5 | 10.5 | 10.3 | 10.46 | 0.12 | 100 | 7.62 | 10.1 | 7.19 | 7.75 | 9.04 | 10.0 | 7.35 | 8.01 | 8.52 | 8.41 | 1.11 | 100 | 1.1E−02 | 2.05 | 4.1 |
| 11515 | 11515_st2 | | | | | | | | | | | | | | | | | | | | | |
| hsa-asg- | hsa-asg- | 5.92 | 6.58 | 6.04 | 6.18 | 0.35 | 100 | 4.17 | 4.23 | 3.06 | 4.36 | 5.66 | 4.70 | 2.48 | 3.91 | 4.60 | 4.13 | 0.93 | 11 | 4.5E−03 | 2.05 | 4.1 |
| 5044 | 5044_st1 | | | | | | | | | | | | | | | | | | | | | |
| hsa-miR- | hsa-miR- | 5.62 | 3.85 | 5.20 | 4.89 | 0.93 | 67 | 4.61 | 3.42 | 2.86 | 3.15 | 3.63 | 2.53 | 1.60 | 1.29 | 2.54 | 2.85 | 1.02 | 0 | 1.2E−02 | 2.04 | 4.1 |
| 19a | 19a_st1 | | | | | | | | | | | | | | | | | | | | | |
| hsa-miR- | hsa-miR- | 5.07 | 3.02 | 4.93 | 4.34 | 1.14 | 67 | 1.85 | 2.16 | 4.12 | 3.34 | 2.69 | 1.01 | 2.78 | 2.53 | 0.21 | 2.30 | 1.18 | 0 | 2.5E−02 | 2.04 | 4.1 |
| 376b | 376b_st1 | | | | | | | | | | | | | | | | | | | | | |
| hsa-asg- | hsa-asg- | 4.86 | 5.83 | 6.25 | 5.65 | 0.71 | 33 | 2.25 | 4.84 | 2.76 | 3.46 | 3.54 | 5.01 | 1.97 | 3.87 | 4.81 | 3.61 | 1.13 | 0 | 1.6E−02 | 2.04 | 4.1 |
| 8987 | 8987_st1 | | | | | | | | | | | | | | | | | | | | | |
| hsa-asg- | hsa-asg- | 9.68 | 9.99 | 9.75 | 9.80 | 0.17 | 100 | 8.01 | 8.75 | 6.95 | 7.98 | 8.46 | 8.73 | 7.14 | 7.37 | 6.57 | 7.77 | 0.80 | 0 | 1.7E−03 | 2.03 | 4.1 |
| 11993 | 11993_st1 | | | | | | | | | | | | | | | | | | | | | |
| hsa-asg- | hsa-asg- | 10.7 | 10.9 | 10.9 | 10.91 | 0.11 | 100 | 9.13 | 9.90 | 7.66 | 8.85 | 9.90 | 9.86 | 8.18 | 8.63 | 7.86 | 8.88 | 0.88 | 44 | 3.1E−03 | 2.03 | 4.1 |
| 8688 | 8688_st1 | | | | | | | | | | | | | | | | | | | | | |
| hsa-asg- | hsa-asg- | 9.67 | 11.1 | 11.5 | 10.78 | 0.98 | 100 | 9.77 | 9.62 | 7.44 | 8.84 | 9.90 | 8.86 | 7.99 | 9.27 | 7.11 | 8.76 | 1.03 | 67 | 1.3E−02 | 2.02 | 4.1 |
| 6292 | 6292_st2 | | | | | | | | | | | | | | | | | | | | | |
| hsa-asg- | hsa-asg- | 6.81 | 7.60 | 7.68 | 7.36 | 0.48 | 100 | 5.54 | 6.40 | 3.46 | 5.78 | 6.01 | 6.71 | 3.59 | 4.93 | 5.64 | 5.34 | 1.15 | 22 | 1.6E−02 | 2.02 | 4.1 |
| 8630 | 8630_st2 | | | | | | | | | | | | | | | | | | | | | |
| hsa-asg- | hsa-asg- | 8.26 | 8.72 | 8.31 | 8.43 | 0.26 | 100 | 6.80 | 7.30 | 5.65 | 6.66 | 6.92 | 7.45 | 5.80 | 5.80 | 5.40 | 6.42 | 0.76 | 67 | 1.4E−03 | 2.01 | 4.0 |
| 9382 | 9382_st2 | | | | | | | | | | | | | | | | | | | | | |
| hsa-asg- | hsa-asg- | 6.02 | 3.02 | 4.37 | 4.47 | 1.50 | 33 | 2.93 | 2.16 | 3.39 | 1.61 | 2.11 | 2.53 | 2.78 | 2.78 | 1.86 | 2.46 | 0.57 | 0 | 5.0E−03 | 2.01 | 4.0 |
| 7295 | 7295_st2 | | | | | | | | | | | | | | | | | | | | | |
| hsa-asg- | hsa-asg- | 10.3 | 10.5 | 10.0 | 10.30 | 0.23 | 100 | 8.48 | 9.45 | 7.54 | 8.27 | 8.62 | 9.39 | 7.17 | 7.95 | 7.75 | 8.29 | 0.79 | 100 | 1.7E−03 | 2.01 | 4.0 |
| 2615 | 2615_st2 | | | | | | | | | | | | | | | | | | | | | |
| hsa-asg- | hsa-asg- | 8.64 | 9.37 | 8.87 | 8.96 | 0.37 | 100 | 7.36 | 7.93 | 6.27 | 6.86 | 7.29 | 7.72 | 6.18 | 6.58 | 6.43 | 6.96 | 0.64 | 100 | 5.2E−04 | 2.00 | 4.0 |
| 7823 | 7823_st1 | | | | | | | | | | | | | | | | | | | | | |
| hsa-asg- | hsa-asg- | 7.48 | 8.49 | 7.71 | 7.89 | 0.53 | 100 | 5.78 | 7.43 | 4.72 | 5.37 | 6.71 | 7.43 | 4.86 | 5.09 | 5.61 | 5.89 | 1.05 | 33 | 1.1E−02 | 2.00 | 4.0 |
| 247 | 247_st1 | | | | | | | | | | | | | | | | | | | | | |
| hsa-asg- | hsa-asg- | 7.24 | 7.61 | 7.50 | 7.45 | 0.19 | 100 | 6.37 | 6.48 | 4.72 | 6.05 | 5.94 | 6.05 | 4.54 | 4.60 | 4.36 | 5.46 | 0.87 | 22 | 3.4E−03 | 1.99 | 4.0 |
| 1153 | 1153_st1 | | | | | | | | | | | | | | | | | | | | | |
| hsa-asg- | hsa-asg- | 6.42 | 6.88 | 6.77 | 6.69 | 0.24 | 100 | 5.03 | 6.02 | 3.91 | 3.95 | 5.14 | 5.05 | 4.20 | 4.58 | 4.47 | 4.71 | 0.68 | 11 | 6.7E−04 | 1.99 | 4.0 |
| 748 | 748_st1 | | | | | | | | | | | | | | | | | | | | | |
| hsa-asg- | hsa-asg- | 6.82 | 6.10 | 6.42 | 6.45 | 0.36 | 100 | 4.61 | 4.95 | 5.67 | 3.77 | 3.10 | 3.54 | 4.86 | 4.83 | 4.84 | 4.46 | 0.82 | 0 | 2.6E−03 | 1.98 | 4.0 |
| 14209 | 14209_st1 | | | | | | | | | | | | | | | | | | | | | |
| hsa-asg- | hsa-asg- | 8.72 | 9.49 | 8.65 | 8.96 | 0.47 | 100 | 6.68 | 7.91 | 5.65 | 6.67 | 7.86 | 7.72 | 6.21 | 6.74 | 7.33 | 6.97 | 0.78 | 89 | 2.2E−03 | 1.98 | 4.0 |
| 1736 | 1736_st1 | | | | | | | | | | | | | | | | | | | | | |
| hsa-asg- | hsa-asg- | 7.08 | 7.82 | 8.01 | 7.64 | 0.49 | 100 | 6.42 | 6.57 | 4.43 | 5.37 | 6.43 | 6.39 | 4.82 | 5.17 | 5.33 | 5.66 | 0.81 | 44 | 2.7E−03 | 1.98 | 3.9 |
| 8138 | 8138_st2 | | | | | | | | | | | | | | | | | | | | | |
| hsa-asg- | hsa-asg- | 9.79 | 10.1 | 10.0 | 9.99 | 0.18 | 100 | 8.57 | 9.37 | 6.81 | 7.99 | 8.62 | 9.08 | 7.41 | 7.91 | 6.38 | 8.02 | 1.01 | 89 | 8.4E−03 | 1.98 | 3.9 |
| 11698 | 11698_st2 | | | | | | | | | | | | | | | | | | | | | |
| hsa-asg- | hsa-asg- | 9.03 | 9.34 | 8.84 | 9.07 | 0.25 | 100 | 7.34 | 8.24 | 6.24 | 6.81 | 7.45 | 7.73 | 6.07 | 7.05 | 6.93 | 7.10 | 0.69 | 100 | 7.9E−04 | 1.98 | 3.9 |
| 6637 | 6637_st1 | | | | | | | | | | | | | | | | | | | | | |
| hsa-asg- | hsa-asg- | 8.58 | 8.91 | 8.78 | 8.76 | 0.16 | 100 | 6.91 | 7.87 | 5.76 | 6.85 | 7.60 | 7.46 | 5.98 | 6.57 | 6.03 | 6.78 | 0.76 | 78 | 1.5E−03 | 1.98 | 3.9 |
| 11962 | 11962_st1 | | | | | | | | | | | | | | | | | | | | | |
| hsa-asg- | hsa-asg- | 7.94 | 7.95 | 7.72 | 7.87 | 0.13 | 100 | 5.14 | 7.40 | 4.39 | 6.07 | 6.41 | 7.10 | 4.69 | 5.42 | 6.44 | 5.90 | 1.05 | 56 | 1.0E−02 | 1.97 | 3.9 |
| 9485 | 9485_st2 | | | | | | | | | | | | | | | | | | | | | |
| hsa-asg- | hsa-asg- | 7.33 | 9.02 | 9.44 | 8.59 | 1.12 | 100 | 6.64 | 7.77 | 5.06 | 6.88 | 7.77 | 6.98 | 6.69 | 5.98 | 5.80 | 6.62 | 0.89 | 78 | 1.0E−02 | 1.97 | 3.9 |
| 3597 | 3597_st2 | | | | | | | | | | | | | | | | | | | | | |
| hsa-miR- | hsa-miR- | 11.4 | 10.5 | 11.6 | 11.25 | 0.58 | 100 | 10.2 | 10.0 | 8.85 | 9.82 | 9.37 | 9.55 | 8.99 | 8.57 | 8.13 | 9.28 | 0.70 | 100 | 1.4E−03 | 1.97 | 3.9 |
| 182 | 182_st1 | | | | | | | | | | | | | | | | | | | | | |
| hsa-asg- | hsa-asg- | 8.11 | 8.09 | 7.73 | 7.98 | 0.21 | 100 | 6.32 | 7.05 | 5.06 | 5.89 | 6.31 | 7.01 | 5.29 | 5.92 | 5.29 | 6.01 | 0.73 | 44 | 1.1E−03 | 1.96 | 3.9 |
| 14136 | 14136_st2 | | | | | | | | | | | | | | | | | | | | | |
| hsa-asg- | hsa-asg- | 7.06 | 7.01 | 7.39 | 7.16 | 0.21 | 100 | 5.70 | 6.17 | 5.12 | 5.53 | 5.14 | 5.25 | 4.54 | 4.44 | 4.87 | 5.19 | 0.55 | 0 | 1.6E−04 | 1.96 | 3.9 |
| 3711 | 3711_st2 | | | | | | | | | | | | | | | | | | | | | |
| hsa-asg- | hsa-asg- | 7.60 | 7.17 | 6.89 | 7.22 | 0.36 | 100 | 5.18 | 6.60 | 4.30 | 4.55 | 4.45 | 6.60 | 4.49 | 5.08 | 6.12 | 5.26 | 0.94 | 44 | 6.4E−03 | 1.96 | 3.9 |
| 3138 | 3138_st2 | | | | | | | | | | | | | | | | | | | | | |
| hsa-asg- | hsa-asg- | 4.81 | 6.18 | 5.95 | 5.64 | 0.73 | 67 | 3.66 | 5.52 | 3.23 | 3.08 | 4.27 | 4.84 | 1.42 | 4.07 | 3.09 | 3.69 | 1.19 | 11 | 2.4E−02 | 1.96 | 3.9 |
| 10158 | 10158_st2 | | | | | | | | | | | | | | | | | | | | | |
| hsa-asg- | hsa-asg- | 8.30 | 8.74 | 8.38 | 8.47 | 0.23 | 100 | 5.96 | 7.81 | 5.57 | 5.71 | 8.62 | 7.10 | 6.14 | 5.99 | 5.78 | 6.52 | 1.08 | 67 | 1.2E−02 | 1.95 | 3.9 |
| 9405 | 9405_st1 | | | | | | | | | | | | | | | | | | | | | |
| hsa-asg- | hsa-asg- | 9.51 | 9.78 | 9.61 | 9.63 | 0.14 | 100 | 8.07 | 8.72 | 6.55 | 7.79 | 8.35 | 8.44 | 6.98 | 7.31 | 6.92 | 7.68 | 0.77 | 78 | 1.7E−03 | 1.95 | 3.9 |
| 12556 | 12556_st1 | | | | | | | | | | | | | | | | | | | | | |
| hsa-miR- | hsa-miR- | 5.49 | 4.59 | 4.16 | 4.75 | 0.68 | 33 | 2.78 | 3.42 | 4.75 | 1.93 | 2.28 | 2.85 | 3.05 | 2.27 | 1.86 | 2.80 | 0.90 | 0 | 6.6E−03 | 1.95 | 3.9 |
| 526a | 526a_st2 | | | | | | | | | | | | | | | | | | | | | |
| hsa-asg- | hsa-asg- | 8.90 | 9.11 | 8.54 | 8.85 | 0.29 | 100 | 7.22 | 7.46 | 6.29 | 6.35 | 7.35 | 6.78 | 6.35 | 7.35 | 6.95 | 6.90 | 0.48 | 100 | 6.3E−05 | 1.95 | 3.9 |
| 773 | 773_st1 | | | | | | | | | | | | | | | | | | | | | |
| hsa-asg- | hsa-asg- | 7.65 | 8.51 | 8.40 | 8.19 | 0.47 | 100 | 6.04 | 7.19 | 5.01 | 5.83 | 6.74 | 6.89 | 5.71 | 5.96 | 6.76 | 6.24 | 0.70 | 67 | 1.2E−03 | 1.95 | 3.9 |
| 12381 | 12381_st1 | | | | | | | | | | | | | | | | | | | | | |
| hsa-asg- | hsa-asg- | 10.9 | 12.1 | 12.3 | 11.80 | 0.78 | 100 | 10.8 | 10.5 | 8.34 | 10.2 | 10.8 | 10.2 | 9.35 | 10.0 | 8.07 | 9.85 | 1.04 | 89 | 1.4E−02 | 1.95 | 3.9 |
| 1341 | 1341_st1 | | | | | | | | | | | | | | | | | | | | | |
| hsa-miR-485-5p | hsa-miR- | 5.86 | 3.96 | 5.33 | 5.05 | 0.98 | 67 | 3.45 | 3.29 | 3.39 | 3.68 | 3.28 | 1.97 | 3.50 | 1.88 | 3.53 | 3.11 | 0.68 | 0 | 3.0E−03 | 1.95 | 3.9 |
| | 485-5p_st2 | | | | | | | | | | | | | | | | | | | | | |
| hsa-asg- | hsa-asg- | 9.16 | 9.85 | 9.73 | 9.58 | 0.37 | 100 | 8.26 | 8.79 | 6.42 | 7.90 | 8.40 | 8.35 | 7.26 | 7.14 | 6.19 | 7.63 | 0.92 | 100 | 6.1E−03 | 1.95 | 3.9 |
| 1861 | 1861_st1 | | | | | | | | | | | | | | | | | | | | | |
| hsa-asg- | hsa-asg- | 10.2 | 10.3 | 10.0 | 10.23 | 0.14 | 100 | 9.01 | 9.50 | 7.15 | 8.46 | 9.01 | 9.29 | 7.69 | 7.72 | 6.75 | 8.29 | 0.99 | 33 | 8.2E−03 | 1.95 | 3.9 |
| 5379 | 5379_st2 | | | | | | | | | | | | | | | | | | | | | |
| hsa-miR- | hsa-miR- | 7.44 | 7.99 | 9.02 | 8.15 | 0.80 | 100 | 7.35 | 6.80 | 6.01 | 7.48 | 6.36 | 5.50 | 5.73 | 5.42 | 5.23 | 6.21 | 0.84 | 56 | 5.7E−03 | 1.94 | 3.8 |
| 489 | 489_st2 | | | | | | | | | | | | | | | | | | | | | |
| hsa-asg- | hsa-asg- | 6.96 | 7.41 | 7.06 | 7.14 | 0.24 | 100 | 5.35 | 6.54 | 4.17 | 5.37 | 5.75 | 6.05 | 4.59 | 4.49 | 4.50 | 5.20 | 0.81 | 11 | 2.6E−03 | 1.94 | 3.8 |
| 3672 | 3672_st1 | | | | | | | | | | | | | | | | | | | | | |
| hsa-asg- | hsa-asg- | 5.81 | 6.12 | 5.52 | 5.82 | 0.30 | 100 | 3.07 | 6.08 | 2.66 | 3.57 | 2.61 | 6.37 | 2.92 | 4.21 | 3.39 | 3.88 | 1.42 | 22 | 4.6E−02 | 1.94 | 3.8 |
| 11799 | 11799_st1 | | | | | | | | | | | | | | | | | | | | | |
| hsa-asg- | hsa-asg- | 10.6 | 12.4 | 12.3 | 11.84 | 1.04 | 100 | 10.6 | 10.2 | 8.54 | 10.4 | 11.2 | 10.0 | 9.59 | 10.4 | 8.02 | 9.90 | 1.03 | 100 | 1.7E−02 | 1.94 | 3.8 |
| 11850 | 11850_st1 | | | | | | | | | | | | | | | | | | | | | |
| hsa-asg- | hsa-asg- | 6.21 | 6.94 | 6.28 | 6.48 | 0.40 | 100 | 5.11 | 5.68 | 3.14 | 5.21 | 5.35 | 4.93 | 4.64 | 4.38 | 2.44 | 4.54 | 1.08 | 11 | 1.4E−02 | 1.94 | 3.8 |
| 7981 | 7981_st1 | | | | | | | | | | | | | | | | | | | | | |
| hsa-asg- | hsa-asg- | 8.45 | 8.68 | 8.55 | 8.56 | 0.12 | 100 | 5.96 | 7.79 | 5.72 | 6.81 | 6.53 | 8.06 | 5.66 | 6.17 | 6.94 | 6.63 | 0.86 | 78 | 3.7E−03 | 1.93 | 3.8 |
| 6860 | 6860_st1 | | | | | | | | | | | | | | | | | | | | | |
| hsa-miR- | hsa- | 5.44 | 5.37 | 5.55 | 5.45 | 0.09 | 100 | 3.93 | 2.54 | 1.92 | 5.43 | 5.30 | 2.53 | 3.17 | 3.20 | 3.65 | 3.52 | 1.21 | 0 | 2.3E−02 | 1.93 | 3.8 |
| 193a | cand178_st1 | | | | | | | | | | | | | | | | | | | | | |
| hsa-miR- | hsa-miR- | 6.32 | 6.41 | 6.42 | 6.38 | 0.06 | 100 | 5.73 | 4.76 | 3.06 | 5.53 | 6.52 | 4.49 | 5.88 | 4.35 | 3.65 | 4.88 | 1.13 | 33 | 4.9E−02 | 1.50 | 2.8 |
| 193a | 193a_st1 | | | | | | | | | | | | | | | | | | | | | |
| hsa-asg- | hsa-asg- | 8.36 | 8.81 | 8.67 | 8.62 | 0.23 | 0 | 7.33 | 7.11 | 5.45 | 7.16 | 6.78 | 6.86 | 6.78 | 6.84 | 5.84 | 6.68 | 0.63 | 33 | 4.7E−04 | 1.93 | 3.8 |
| 872 | 872_st2 | | | | | | | | | | | | | | | | | | | | | |
| hsa-asg- | hsa-asg- | 9.84 | 10.3 | 10.2 | 10.15 | 0.28 | 100 | 8.57 | 8.98 | 7.30 | 8.52 | 8.94 | 8.85 | 7.61 | 7.94 | 7.23 | 8.22 | 0.71 | 100 | 1.1E−03 | 1.93 | 3.8 |
| 1277 | 1277_st1 | | | | | | | | | | | | | | | | | | | | | |
| hsa-asg- | hsa-asg- | 6.43 | 6.63 | 6.34 | 6.47 | 0.15 | 100 | 4.99 | 6.05 | 3.73 | 3.87 | 5.19 | 5.73 | 3.68 | 5.43 | 2.21 | 4.54 | 1.24 | 11 | 2.6E−02 | 1.92 | 3.8 |
| 9071 | 9071_st1 | | | | | | | | | | | | | | | | | | | | | |
| hsa-asg- | hsa-asg- | 10.2 | 10.6 | 10.3 | 10.41 | 0.21 | 100 | 9.24 | 9.39 | 7.48 | 8.91 | 9.24 | 9.18 | 7.75 | 8.16 | 7.08 | 8.49 | 0.88 | 100 | 4.6E−03 | 1.92 | 3.8 |
| 11112 | 11112_st2 | | | | | | | | | | | | | | | | | | | | | |
| hsa-asg- | hsa-asg- | 7.64 | 8.01 | 8.21 | 7.96 | 0.29 | 100 | 6.69 | 6.76 | 4.58 | 6.05 | 6.66 | 7.00 | 5.64 | 5.94 | 5.02 | 6.04 | 0.84 | 56 | 3.5E−03 | 1.92 | 3.8 |
| 6282 | 6282_st1 | | | | | | | | | | | | | | | | | | | | | |
| hsa-asg- | hsa-asg- | 9.35 | 9.65 | 9.17 | 9.39 | 0.24 | 100 | 8.28 | 8.62 | 6.97 | 7.10 | 7.77 | 8.46 | 6.51 | 7.21 | 6.29 | 7.47 | 0.85 | 0 | 3.8E−03 | 1.92 | 3.8 |
| 5163 | 5163_st1 | | | | | | | | | | | | | | | | | | | | | |
| hsa-asg- | hsa-asg- | 5.86 | 5.73 | 5.88 | 5.82 | 0.08 | 100 | 2.93 | 6.18 | 3.67 | 3.95 | 3.49 | 6.04 | 1.97 | 3.54 | 3.39 | 3.91 | 1.37 | 11 | 4.1E−02 | 1.92 | 3.8 |
| 12343 | 12343_st1 | | | | | | | | | | | | | | | | | | | | | |
| hsa-asg- | hsa-asg- | 5.34 | 6.01 | 5.57 | 5.64 | 0.34 | 100 | 4.02 | 5.19 | 2.66 | 4.40 | 4.68 | 2.77 | 4.20 | 2.08 | 3.53 | 3.72 | 1.04 | 0 | 1.2E−02 | 1.92 | 3.8 |
| 5741 | 5741_st2 | | | | | | | | | | | | | | | | | | | | | |
| hsa-asg- | hsa-asg- | 7.73 | 7.85 | 7.57 | 7.72 | 0.14 | 100 | 6.51 | 6.68 | 4.26 | 5.77 | 6.19 | 6.33 | 5.49 | 5.49 | 5.51 | 5.80 | 0.74 | 22 | 1.5E−03 | 1.91 | 3.8 |
| 1040 | 1040_st2 | | | | | | | | | | | | | | | | | | | | | |
| hsa-asg- | hsa-asg- | 7.60 | 8.10 | 8.23 | 7.98 | 0.33 | 100 | 6.40 | 6.88 | 5.58 | 6.19 | 6.24 | 6.63 | 5.51 | 5.78 | 5.37 | 6.06 | 0.53 | 56 | 1.7E−04 | 1.91 | 3.8 |
| 1293 | 1293_st2 | | | | | | | | | | | | | | | | | | | | | |
| hsa-asg- | hsa-asg- | 11.1 | 11.3 | 11.0 | 11.18 | 0.15 | 100 | 9.79 | 10.1 | 8.16 | 9.48 | 10.1 | 10.1 | 8.64 | 8.97 | 7.81 | 9.26 | 0.91 | 89 | 5.5E−03 | 1.91 | 3.8 |
| 2195 | 2195_st1 | | | | | | | | | | | | | | | | | | | | | |
| hsa-asg- | hsa-asg- | 8.37 | 8.70 | 8.46 | 8.51 | 0.17 | 100 | 7.13 | 7.83 | 5.55 | 6.35 | 7.20 | 7.38 | 5.69 | 6.42 | 5.88 | 6.60 | 0.82 | 89 | 2.9E−03 | 1.91 | 3.8 |
| 11521 | 11521_st1 | | | | | | | | | | | | | | | | | | | | | |
| hsa- | hsa- | 8.65 | 9.12 | 8.69 | 8.82 | 0.26 | 100 | 7.44 | 8.08 | 5.65 | 6.94 | 7.39 | 8.04 | 5.90 | 6.55 | 6.26 | 6.92 | 0.89 | 89 | 5.2E−03 | 1.90 | 3.7 |
| cand545 | cand545_st1 | | | | | | | | | | | | | | | | | | | | | |
| hsa-asg- | hsa-asg- | 6.28 | 6.72 | 6.72 | 6.57 | 0.26 | 100 | 5.11 | 5.61 | 4.47 | 4.66 | 5.94 | 5.17 | 2.48 | 4.87 | 3.77 | 4.67 | 1.04 | 22 | 1.2E−02 | 1.90 | 3.7 |
| 841 | 841_st1 | | | | | | | | | | | | | | | | | | | | | |
| hsa-asg- | hsa-asg- | 8.03 | 8.06 | 8.83 | 8.31 | 0.45 | 100 | 7.02 | 6.39 | 7.09 | 7.51 | 6.90 | 6.04 | 6.76 | 5.59 | 4.40 | 6.41 | 0.95 | 67 | 8.7E−03 | 1.90 | 3.7 |
| 13205 | 13205_st1 | | | | | | | | | | | | | | | | | | | | | |
| hsa-asg- | hsa-asg- | 7.65 | 8.08 | 8.06 | 7.93 | 0.24 | 100 | 6.23 | 6.95 | 5.39 | 5.97 | 6.20 | 6.04 | 6.00 | 6.45 | 5.07 | 6.03 | 0.55 | 78 | 2.1E−04 | 1.89 | 3.7 |
| 10971 | 10971_st2 | | | | | | | | | | | | | | | | | | | | | |
| hsa-asg- | hsa-asg- | 5.42 | 3.37 | 3.92 | 4.24 | 1.06 | 33 | 2.78 | 2.36 | 2.66 | 2.33 | 1.64 | 2.17 | 1.60 | 2.08 | 3.53 | 2.35 | 0.59 | 0 | 2.6E−03 | 1.89 | 3.7 |
| 12139 | 12139_st2 | | | | | | | | | | | | | | | | | | | | | |
| hsa-asg- | hsa-asg- | 8.14 | 8.20 | 7.79 | 8.04 | 0.22 | 100 | 6.20 | 7.14 | 5.21 | 6.43 | 6.28 | 6.58 | 6.00 | 5.49 | 6.13 | 6.16 | 0.57 | 44 | 2.8E−04 | 1.88 | 3.7 |
| 2314 | 2314_st1 | | | | | | | | | | | | | | | | | | | | | |
| hsa-asg- | hsa-asg- | 9.02 | 9.41 | 9.10 | 9.18 | 0.20 | 100 | 7.53 | 8.18 | 6.15 | 7.58 | 7.94 | 8.12 | 6.38 | 6.75 | 7.03 | 7.29 | 0.75 | 89 | 1.9E−03 | 1.88 | 3.7 |
| 12687 | 12687_st1 | | | | | | | | | | | | | | | | | | | | | |
| hsa-asg- | hsa-asg- | 8.07 | 9.40 | 9.22 | 8.90 | 0.72 | 67 | 8.10 | 7.49 | 5.53 | 7.17 | 7.78 | 7.18 | 6.38 | 7.87 | 5.66 | 7.02 | 0.95 | 33 | 1.1E−02 | 1.88 | 3.7 |
| 2535 | 2535_st2 | | | | | | | | | | | | | | | | | | | | | |
| hsa-asg- | hsa-asg- | 7.75 | 8.37 | 8.35 | 8.16 | 0.35 | 100 | 6.25 | 7.44 | 5.76 | 6.14 | 6.85 | 6.95 | 5.61 | 6.19 | 5.33 | 6.28 | 0.69 | 78 | 1.2E−03 | 1.88 | 3.7 |
| 7671 | 7671_st1 | | | | | | | | | | | | | | | | | | | | | |
| hsa-asg- | hsa-asg- | 8.72 | 8.90 | 8.64 | 8.75 | 0.14 | 100 | 7.18 | 7.78 | 5.65 | 6.79 | 7.38 | 7.53 | 6.58 | 6.78 | 6.21 | 6.88 | 0.67 | 89 | 8.9E−04 | 1.88 | 3.7 |
| 4786 | 4786_st1 | | | | | | | | | | | | | | | | | | | | | |
| hsa-asg- | hsa-asg- | 10.5 | 11.9 | 11.9 | 11.50 | 0.83 | 100 | 10.6 | 10.0 | 8.14 | 10.0 | 10.9 | 9.89 | 9.20 | 10.1 | 7.56 | 9.62 | 1.12 | 100 | 2.5E−02 | 1.88 | 3.7 |
| 4392 | 4392_st1 | | | | | | | | | | | | | | | | | | | | | |
| hsa-asg- | hsa-asg- | 8.67 | 9.26 | 9.02 | 8.98 | 0.30 | 67 | 7.74 | 8.06 | 6.19 | 7.36 | 7.86 | 7.50 | 6.17 | 6.72 | 6.39 | 7.11 | 0.75 | 44 | 2.1E−03 | 1.87 | 3.7 |
| 7954 | 7954_st1 | | | | | | | | | | | | | | | | | | | | | |
| hsa-asg- | hsa-asg- | 9.71 | 10.1 | 9.64 | 9.85 | 0.30 | 100 | 8.20 | 9.32 | 6.96 | 7.64 | 8.53 | 9.24 | 6.70 | 7.97 | 7.22 | 7.97 | 0.94 | 100 | 8.1E−03 | 1.87 | 3.7 |
| 5378 | 5378_st2 | | | | | | | | | | | | | | | | | | | | | |
| hsa-asg- | hsa-asg- | 9.96 | 10.3 | 10.2 | 10.16 | 0.18 | 100 | 8.45 | 9.31 | 7.11 | 8.05 | 8.55 | 9.51 | 7.51 | 8.75 | 7.36 | 8.29 | 0.85 | 100 | 4.2E−03 | 1.87 | 3.7 |
| 3462 | 3462_st2 | | | | | | | | | | | | | | | | | | | | | |
| hsa-asg- | hsa-asg- | 9.22 | 9.26 | 8.94 | 9.14 | 0.18 | 100 | 7.64 | 8.08 | 6.56 | 6.92 | 7.74 | 7.49 | 6.24 | 6.70 | 8.09 | 7.27 | 0.68 | 100 | 1.0E−03 | 1.87 | 3.7 |
| 2580 | 2580_st1 | | | | | | | | | | | | | | | | | | | | | |
| hsa- | hsa- | 8.00 | 8.48 | 8.32 | 8.27 | 0.24 | 100 | 6.74 | 7.25 | 5.49 | 7.08 | 6.93 | 7.08 | 5.88 | 5.99 | 5.18 | 6.40 | 0.77 | 78 | 2.5E−03 | 1.87 | 3.6 |
| cand266 | cand266_st1 | | | | | | | | | | | | | | | | | | | | | |
| hsa-asg- | hsa-asg- | 11.3 | 11.6 | 11.6 | 11.57 | 0.16 | 100 | 10.4 | 10.7 | 8.60 | 10.0 | 10.4 | 10.4 | 9.06 | 9.51 | 8.05 | 9.71 | 0.95 | 89 | 8.5E−03 | 1.86 | 3.6 |
| 6234 | 6234_st1 | | | | | | | | | | | | | | | | | | | | | |
| hsa-asg- | hsa-asg- | 7.98 | 8.24 | 7.76 | 7.99 | 0.24 | 100 | 4.85 | 7.01 | 5.74 | 5.83 | 5.99 | 6.54 | 5.49 | 6.68 | 7.06 | 6.13 | 0.74 | 56 | 1.9E−03 | 1.86 | 3.6 |
| 1140 | 1140_st2 | | | | | | | | | | | | | | | | | | | | | |
| hsa-asg- | hsa-asg- | 6.38 | 6.52 | 6.24 | 6.38 | 0.14 | 100 | 4.81 | 5.42 | 3.60 | 4.40 | 4.04 | 5.17 | 3.85 | 4.76 | 4.63 | 4.52 | 0.60 | 0 | 4.3E−04 | 1.86 | 3.6 |
| 3614 | 3614_st1 | | | | | | | | | | | | | | | | | | | | | |
| hsa-asg- | hsa-asg- | 8.28 | 8.64 | 8.77 | 8.56 | 0.25 | 100 | 6.68 | 7.28 | 6.66 | 6.88 | 7.07 | 7.06 | 6.07 | 6.55 | 6.10 | 6.71 | 0.42 | 100 | 3.3E−05 | 1.86 | 3.6 |
| 11973 | 11973_st2 | | | | | | | | | | | | | | | | | | | | | |
| hsa-asg- | hsa-asg- | 6.47 | 6.04 | 6.50 | 6.34 | 0.26 | 67 | 5.62 | 5.68 | 2.96 | 5.39 | 5.57 | 4.03 | 3.59 | 2.70 | 4.81 | 4.48 | 1.19 | 11 | 2.6E−02 | 1.85 | 3.6 |
| 10391 | 10391_st2 | | | | | | | | | | | | | | | | | | | | | |
| hsa-asg- | hsa-asg- | 9.23 | 9.66 | 9.60 | 9.50 | 0.23 | 100 | 8.03 | 8.83 | 6.56 | 7.51 | 8.02 | 8.49 | 7.09 | 7.31 | 6.95 | 7.64 | 0.75 | 100 | 2.1E−03 | 1.85 | 3.6 |
| 3746 | 3746_st1 | | | | | | | | | | | | | | | | | | | | | |
| hsa-miR- | hsa- | 6.47 | 6.52 | 7.13 | 6.71 | 0.37 | 100 | 5.94 | 5.23 | 4.02 | 6.58 | 5.46 | 4.24 | 5.64 | 3.07 | 3.53 | 4.86 | 1.19 | 44 | 2.7E−02 | 1.85 | 3.6 |
| 365 | cand708_st1 | | | | | | | | | | | | | | | | | | | | | |
| hsa-miR- | hsa-miR- | 7.69 | 7.62 | 7.76 | 7.69 | 0.07 | 100 | 7.27 | 5.64 | 5.53 | 7.63 | 6.38 | 5.40 | 6.66 | 4.78 | 4.78 | 6.01 | 1.03 | 56 | 2.1E−02 | 1.68 | 3.2 |
| 365 | 365_st1 | | | | | | | | | | | | | | | | | | | | | |
| hsa-miR- | hsa-asg- | 7.39 | 7.44 | 7.85 | 7.56 | 0.25 | 100 | 7.33 | 5.87 | 6.09 | 7.37 | 6.38 | 5.46 | 6.63 | 4.78 | 4.67 | 6.06 | 0.98 | 56 | 2.9E−02 | 1.50 | 2.8 |
| 365 | 13156_st1 | | | | | | | | | | | | | | | | | | | | | |
| hsa-asg- | hsa-asg- | 8.28 | 8.59 | 8.35 | 8.41 | 0.16 | 100 | 7.24 | 7.55 | 5.47 | 6.46 | 7.05 | 7.02 | 5.71 | 6.39 | 6.13 | 6.56 | 0.71 | 67 | 1.4E−03 | 1.85 | 3.6 |
| 11847 | 11847_st1 | | | | | | | | | | | | | | | | | | | | | |
| hsa-miR- | hsa-miR- | 5.44 | 3.82 | 5.12 | 4.79 | 0.86 | 33 | 2.43 | 3.42 | 3.39 | 2.93 | 3.44 | 2.77 | 3.29 | 1.88 | 2.92 | 2.94 | 0.52 | 0 | 1.0E−03 | 1.85 | 3.6 |
| 299-3p | 299-3p_st2 | | | | | | | | | | | | | | | | | | | | | |
| hsa-miR- | hsa-asg- | 5.42 | 3.72 | 4.16 | 4.43 | 0.88 | 33 | 3.66 | 3.42 | 3.23 | 1.93 | 2.45 | 1.97 | 1.60 | 3.20 | 3.53 | 2.78 | 0.79 | 0 | 1.1E−02 | 1.66 | 3.2 |
| 299-3p | 10378_st1 | | | | | | | | | | | | | | | | | | | | | |
| hsa-asg- | hsa-asg- | 9.96 | 10.2 | 9.47 | 9.90 | 0.41 | 100 | 8.28 | 8.79 | 6.24 | 8.51 | 9.52 | 8.93 | 7.30 | 7.86 | 7.08 | 8.06 | 1.03 | 89 | 1.4E−02 | 1.85 | 3.6 |
| 914 | 914_st1 | | | | | | | | | | | | | | | | | | | | | |
| hsa-asg- | hsa-asg- | 7.71 | 8.04 | 7.75 | 7.83 | 0.18 | 100 | 6.46 | 7.18 | 5.14 | 5.71 | 5.90 | 7.08 | 5.29 | 5.79 | 5.39 | 5.99 | 0.75 | 44 | 2.2E−03 | 1.84 | 3.6 |
| 265 | 265_st2 | | | | | | | | | | | | | | | | | | | | | |
| hsa-asg- | hsa-asg- | 9.02 | 8.87 | 8.60 | 8.83 | 0.21 | 100 | 6.10 | 8.52 | 6.24 | 6.84 | 7.18 | 8.37 | 5.73 | 6.75 | 7.21 | 6.99 | 0.96 | 100 | 9.5E−03 | 1.84 | 3.6 |
| 11956 | 11956_st1 | | | | | | | | | | | | | | | | | | | | | |
| hsa-asg- | hsa-asg- | 8.65 | 9.05 | 8.56 | 8.76 | 0.26 | 100 | 7.38 | 7.86 | 6.17 | 7.36 | 7.80 | 7.35 | 6.36 | 6.23 | 5.80 | 6.92 | 0.78 | 89 | 3.0E−03 | 1.83 | 3.6 |
| 11626 | 11626_st1 | | | | | | | | | | | | | | | | | | | | | |
| hsa-asg- | hsa-asg- | 9.77 | 9.97 | 9.79 | 9.84 | 0.11 | 100 | 8.22 | 9.25 | 7.26 | 8.00 | 8.25 | 9.10 | 7.24 | 7.66 | 7.13 | 8.01 | 0.78 | 100 | 2.8E−03 | 1.83 | 3.6 |
| 4828 | 4828_st1 | | | | | | | | | | | | | | | | | | | | | |
| hsa-asg- | hsa-asg- | 8.62 | 8.20 | 8.49 | 8.44 | 0.22 | 100 | 5.11 | 8.61 | 5.17 | 5.96 | 6.94 | 8.47 | 5.75 | 6.04 | 7.50 | 6.62 | 1.33 | 56 | 4.5E−02 | 1.82 | 3.5 |
| 4339 | 4339_st2 | | | | | | | | | | | | | | | | | | | | | |
| hsa-asg- | hsa-asg- | 5.90 | 6.42 | 5.59 | 5.97 | 0.42 | 100 | 4.43 | 4.95 | 4.54 | 3.91 | 3.85 | 5.37 | 3.77 | 3.44 | 3.09 | 4.15 | 0.73 | 0 | 2.4E−03 | 1.82 | 3.5 |
| 10114 | 10114_st1 | | | | | | | | | | | | | | | | | | | | | |
| hsa-asg- | hsa-asg- | 10.1 | 10.2 | 10.0 | 10.14 | 0.07 | 100 | 8.66 | 9.61 | 7.29 | 7.84 | 8.41 | 9.61 | 7.01 | 8.17 | 8.25 | 8.32 | 0.90 | 22 | 7.0E−03 | 1.82 | 3.5 |
| 8624 | 8624_st2 | | | | | | | | | | | | | | | | | | | | | |
| hsa-asg- | hsa-asg- | 10.1 | 10.2 | 9.95 | 10.12 | 0.16 | 100 | 9.22 | 9.37 | 7.41 | 8.49 | 8.97 | 9.12 | 7.52 | 7.82 | 6.83 | 8.30 | 0.93 | 100 | 8.5E−03 | 1.82 | 3.5 |
| 6728 | 6728_st2 | | | | | | | | | | | | | | | | | | | | | |
| hsa-asg- | hsa-asg- | 5.26 | 3.52 | 4.22 | 4.33 | 0.88 | 33 | 1.65 | 2.87 | 2.86 | 1.72 | 2.01 | 1.97 | 2.78 | 2.62 | 4.16 | 2.52 | 0.79 | 0 | 7.0E−03 | 1.81 | 3.5 |
| 4978 | 4978_st2 | | | | | | | | | | | | | | | | | | | | | |
| hsa-asg- | hsa-asg- | 6.15 | 6.22 | 5.66 | 6.01 | 0.30 | 33 | 3.93 | 4.40 | 3.85 | 4.26 | 4.36 | 4.75 | 2.92 | 4.03 | 5.25 | 4.20 | 0.64 | 0 | 9.8E−04 | 1.81 | 3.5 |
| 12598 | 12598_st1 | | | | | | | | | | | | | | | | | | | | | |
| hsa- | hsa- | 5.78 | 6.76 | 5.94 | 6.16 | 0.53 | 33 | 4.71 | 5.57 | 3.14 | 3.95 | 4.30 | 5.17 | 3.17 | 4.66 | 4.43 | 4.35 | 0.82 | 0 | 5.4E−03 | 1.81 | 3.5 |
| miR219 | miR219_st2 | | | | | | | | | | | | | | | | | | | | | |
| hsa-asg- | hsa-asg- | 9.45 | 9.99 | 9.61 | 9.68 | 0.28 | 100 | 7.81 | 8.95 | 6.65 | 7.47 | 8.04 | 8.90 | 7.25 | 7.89 | 7.87 | 7.87 | 0.73 | 100 | 2.2E−03 | 1.81 | 3.5 |
| 5139 | 5139_st1 | | | | | | | | | | | | | | | | | | | | | |
| hsa-asg- | hsa-asg- | 4.98 | 5.48 | 5.73 | 5.40 | 0.38 | 67 | 3.33 | 4.55 | 3.06 | 3.87 | 2.69 | 4.28 | 2.64 | 3.91 | 3.97 | 3.59 | 0.69 | 0 | 1.6E−03 | 1.81 | 3.5 |
| 4872 | 4872_st1 | | | | | | | | | | | | | | | | | | | | | |
| hsa-asg- | hsa-asg- | 10.4 | 11.9 | 11.8 | 11.41 | 0.81 | 100 | 10.7 | 9.96 | 8.45 | 10.2 | 10.9 | 9.82 | 9.35 | 9.73 | 7.18 | 9.60 | 1.17 | 100 | 3.4E−02 | 1.81 | 3.5 |
| 11237 | 11237_st1 | | | | | | | | | | | | | | | | | | | | | |
| hsa-asg- | hsa-asg- | 4.77 | 6.12 | 6.71 | 5.87 | 1.00 | 67 | 3.85 | 4.95 | 3.67 | 4.26 | 4.87 | 3.48 | 3.59 | 4.21 | 3.65 | 4.06 | 0.55 | 0 | 2.2E−03 | 1.81 | 3.5 |
| 3742 | 3742_st1 | | | | | | | | | | | | | | | | | | | | | |
| hsa- | hsa- | 9.54 | 10.1 | 10.2 | 9.96 | 0.37 | 100 | 8.24 | 9.25 | 7.33 | 8.24 | 8.85 | 8.75 | 7.67 | 7.88 | 7.23 | 8.16 | 0.70 | 100 | 1.8E−03 | 1.80 | 3.5 |
| cand805 | cand805_st2 | | | | | | | | | | | | | | | | | | | | | |
| hsa-miR- | hsa-miR- | 8.93 | 7.84 | 9.60 | 8.79 | 0.89 | 100 | 7.66 | 6.76 | 6.71 | 7.93 | 7.56 | 5.83 | 7.52 | 6.32 | 6.65 | 6.99 | 0.70 | 89 | 4.7E−03 | 1.79 | 3.5 |
| 183 | 183_st1 | | | | | | | | | | | | | | | | | | | | | |
| hsa-asg- | hsa-asg- | 9.37 | 8.98 | 9.06 | 9.13 | 0.21 | 100 | 6.75 | 8.89 | 6.76 | 7.19 | 7.30 | 9.05 | 5.64 | 6.89 | 7.59 | 7.34 | 1.07 | 89 | 1.8E−02 | 1.79 | 3.5 |
| 10577 | 10577_st1 | | | | | | | | | | | | | | | | | | | | | |
| hsa-asg- | hsa-asg- | 7.05 | 7.81 | 6.79 | 7.22 | 0.53 | 100 | 4.90 | 6.53 | 4.81 | 5.68 | 5.94 | 6.42 | 4.33 | 5.04 | 5.18 | 5.43 | 0.76 | 33 | 3.8E−03 | 1.79 | 3.5 |
| 9128 | 9128_st1 | | | | | | | | | | | | | | | | | | | | | |
| hsa-asg- | hsa-asg- | 6.48 | 6.97 | 6.75 | 6.73 | 0.25 | 67 | 4.66 | 5.90 | 4.26 | 4.76 | 4.55 | 6.05 | 4.49 | 4.80 | 5.02 | 4.94 | 0.62 | 0 | 8.0E−04 | 1.79 | 3.5 |
| 8435 | 8435_st2 | | | | | | | | | | | | | | | | | | | | | |
| hsa-asg- | hsa-asg- | 6.21 | 6.39 | 6.08 | 6.23 | 0.15 | 67 | 3.33 | 6.09 | 4.58 | 4.12 | 4.53 | 5.57 | 1.97 | 4.49 | 5.25 | 4.44 | 1.23 | 11 | 3.5E−02 | 1.79 | 3.5 |
| 9166 | 9166_st1 | | | | | | | | | | | | | | | | | | | | | |
| hsa-asg- | hsa-asg- | 8.37 | 8.84 | 8.68 | 8.63 | 0.24 | 100 | 7.04 | 8.02 | 5.85 | 6.75 | 7.38 | 7.59 | 5.94 | 6.44 | 6.56 | 6.84 | 0.74 | 89 | 2.4E−03 | 1.79 | 3.5 |
| 4759 | 4759_st1 | | | | | | | | | | | | | | | | | | | | | |
| hsa-asg- | hsa-asg- | 7.47 | 8.27 | 8.00 | 7.91 | 0.41 | 100 | 6.35 | 7.03 | 4.75 | 6.59 | 7.21 | 6.68 | 5.19 | 6.25 | 5.09 | 6.13 | 0.90 | 67 | 8.5E−03 | 1.79 | 3.5 |
| 8271 | 8271_st2 | | | | | | | | | | | | | | | | | | | | | |
| hsa-asg- | hsa-asg- | 7.26 | 7.84 | 7.05 | 7.38 | 0.41 | 100 | 5.51 | 6.42 | 5.21 | 5.53 | 5.36 | 6.33 | 5.40 | 4.71 | 5.91 | 5.60 | 0.54 | 0 | 4.2E−04 | 1.78 | 3.4 |
| 9117 | 9117_st1 | | | | | | | | | | | | | | | | | | | | | |
| hsa-asg- | hsa-asg- | 11.3 | 11.4 | 11.1 | 11.31 | 0.14 | 100 | 9.93 | 10.5 | 8.91 | 9.30 | 9.94 | 10.4 | 8.63 | 9.34 | 8.67 | 9.52 | 0.72 | 100 | 2.1E−03 | 1.78 | 3.4 |
| 9078 | 9078_st2 | | | | | | | | | | | | | | | | | | | | | |
| hsa-asg- | hsa-asg- | 8.86 | 9.01 | 8.87 | 8.91 | 0.08 | 100 | 7.72 | 8.05 | 5.88 | 7.02 | 7.79 | 7.83 | 6.35 | 7.29 | 6.26 | 7.13 | 0.80 | 89 | 3.9E−03 | 1.78 | 3.4 |
| 8291 | 8291_st1 | | | | | | | | | | | | | | | | | | | | | |
| hsa-asg- | hsa-asg- | 5.62 | 6.58 | 7.00 | 6.40 | 0.71 | 67 | 5.03 | 5.57 | 4.17 | 4.49 | 4.45 | 5.25 | 4.94 | 3.69 | 4.02 | 4.62 | 0.62 | 0 | 1.8E−03 | 1.78 | 3.4 |
| 9009 | 9009_st1 | | | | | | | | | | | | | | | | | | | | | |
| hsa-asg- | hsa-asg- | 9.16 | 9.32 | 9.45 | 9.31 | 0.14 | 100 | 7.86 | 8.14 | 6.65 | 7.37 | 8.07 | 7.51 | 7.11 | 7.45 | 7.65 | 7.53 | 0.47 | 100 | 9.3E−05 | 1.78 | 3.4 |
| 1576 | 1576_st1 | | | | | | | | | | | | | | | | | | | | | |
| hsa-asg- | hsa-asg- | 5.85 | 6.53 | 6.07 | 6.15 | 0.35 | 33 | 5.35 | 5.51 | 3.31 | 3.77 | 3.97 | 5.49 | 3.93 | 4.85 | 3.17 | 4.37 | 0.94 | 0 | 1.0E−02 | 1.78 | 3.4 |
| 13387 | 13387_st1 | | | | | | | | | | | | | | | | | | | | | |
| hsa-asg- | hsa-asg- | 8.02 | 8.53 | 7.94 | 8.16 | 0.32 | 100 | 6.79 | 7.78 | 5.39 | 5.83 | 6.54 | 7.17 | 5.40 | 6.57 | 5.98 | 6.38 | 0.81 | 67 | 4.6E−03 | 1.78 | 3.4 |
| 10338 | 10338_st1 | | | | | | | | | | | | | | | | | | | | | |
| hsa-asg- | hsa-asg- | 9.21 | 9.62 | 9.23 | 9.35 | 0.23 | 100 | 7.74 | 8.92 | 6.75 | 7.42 | 7.75 | 8.56 | 6.82 | 7.67 | 6.57 | 7.58 | 0.80 | 78 | 4.2E−03 | 1.78 | 3.4 |
| 12441 | 12441_st1 | | | | | | | | | | | | | | | | | | | | | |
| hsa-asg- | hsa-asg- | 10.7 | 11.0 | 10.7 | 10.82 | 0.20 | 100 | 9.47 | 10.0 | 8.18 | 9.09 | 9.85 | 9.74 | 8.25 | 8.89 | 7.90 | 9.04 | 0.79 | 67 | 3.8E−03 | 1.77 | 3.4 |
| 12289 | 12289_st1 | | | | | | | | | | | | | | | | | | | | | |
| hsa-asg- | hsa-asg- | 7.93 | 8.10 | 7.80 | 7.94 | 0.15 | 100 | 6.40 | 7.45 | 5.51 | 6.18 | 5.99 | 6.83 | 5.69 | 5.89 | 5.61 | 6.17 | 0.63 | 56 | 9.0E−04 | 1.77 | 3.4 |
| 3150 | 3150_st1 | | | | | | | | | | | | | | | | | | | | | |
| hsa-asg- | hsa-asg- | 7.33 | 7.59 | 7.44 | 7.45 | 0.13 | 100 | 5.45 | 6.81 | 5.33 | 5.63 | 6.40 | 6.06 | 4.73 | 5.32 | 5.42 | 5.68 | 0.63 | 33 | 8.9E−04 | 1.77 | 3.4 |
| 5413 | 5413_st2 | | | | | | | | | | | | | | | | | | | | | |
| hsa-asg- | hsa-asg- | 9.19 | 9.20 | 8.50 | 8.96 | 0.40 | 100 | 7.86 | 8.02 | 6.90 | 6.99 | 7.42 | 7.88 | 6.22 | 7.07 | 6.36 | 7.19 | 0.66 | 89 | 1.5E−03 | 1.77 | 3.4 |
| 8872 | 8872_st1 | | | | | | | | | | | | | | | | | | | | | |
| hsa-miR- | hsa-miR- | 7.37 | 7.62 | 6.85 | 7.28 | 0.39 | 100 | 5.73 | 6.36 | 5.24 | 4.88 | 5.90 | 6.19 | 4.78 | 5.42 | 5.14 | 5.51 | 0.56 | 44 | 5.5E−04 | 1.77 | 3.4 |
| 498 | 498_st1 | | | | | | | | | | | | | | | | | | | | | |
| hsa- | hsa- | 6.98 | 6.81 | 6.82 | 6.87 | 0.10 | 100 | 5.18 | 6.15 | 5.26 | 4.55 | 4.99 | 5.69 | 3.77 | 5.06 | 5.29 | 5.10 | 0.67 | 0 | 1.3E−03 | 1.77 | 3.4 |
| cand630 | cand630_st2 | | | | | | | | | | | | | | | | | | | | | |
| hsa-asg- | hsa-asg- | 9.98 | 10.3 | 9.93 | 10.09 | 0.24 | 100 | 8.74 | 9.49 | 7.41 | 8.22 | 8.79 | 9.26 | 7.59 | 7.94 | 7.44 | 8.32 | 0.78 | 100 | 3.8E−03 | 1.77 | 3.4 |
| 6371 | 6371_st2 | | | | | | | | | | | | | | | | | | | | | |
| hsa-asg- | hsa-asg- | 8.47 | 8.62 | 8.48 | 8.52 | 0.09 | 100 | 7.13 | 7.55 | 5.47 | 6.78 | 7.64 | 7.45 | 6.09 | 6.65 | 6.08 | 6.76 | 0.76 | 78 | 2.9E−03 | 1.76 | 3.4 |
| 13829 | 13829_st2 | | | | | | | | | | | | | | | | | | | | | |
| hsa-asg- | hsa-asg- | 5.60 | 6.39 | 5.89 | 5.96 | 0.40 | 100 | 4.09 | 5.19 | 2.86 | 3.40 | 4.58 | 4.89 | 3.77 | 4.28 | 4.73 | 4.20 | 0.75 | 11 | 3.4E−03 | 1.76 | 3.4 |
| 12564 | 12564_st1 | | | | | | | | | | | | | | | | | | | | | |
| hsa-asg- | hsa-asg- | 6.55 | 7.28 | 6.85 | 6.89 | 0.37 | 100 | 5.14 | 5.92 | 3.46 | 4.91 | 5.75 | 4.95 | 4.69 | 5.80 | 5.58 | 5.13 | 0.77 | 0 | 3.8E−03 | 1.76 | 3.4 |
| 3716 | 3716_st1 | | | | | | | | | | | | | | | | | | | | | |
| hsa-asg- | hsa-asg- | 6.35 | 5.81 | 5.76 | 5.97 | 0.33 | 33 | 3.56 | 5.35 | 3.31 | 2.93 | 4.24 | 5.46 | 3.93 | 4.31 | 4.87 | 4.22 | 0.88 | 0 | 8.3E−03 | 1.76 | 3.4 |
| 12799 | 12799_st1 | | | | | | | | | | | | | | | | | | | | | |
| hsa-asg- | hsa-asg- | 7.16 | 7.48 | 7.28 | 7.31 | 0.16 | 100 | 5.03 | 6.47 | 4.61 | 5.28 | 5.73 | 6.62 | 4.94 | 5.67 | 5.63 | 5.55 | 0.67 | 22 | 1.4E−03 | 1.76 | 3.4 |
| 8641 | 8641_st1 | | | | | | | | | | | | | | | | | | | | | |
| hsa- | hsa- | 5.46 | 5.37 | 5.55 | 5.46 | 0.09 | 67 | 4.09 | 4.81 | 3.91 | 2.93 | 4.91 | 2.35 | 2.64 | 3.83 | 3.87 | 3.71 | 0.90 | 0 | 8.5E−03 | 1.75 | 3.4 |
| cand360 | cand360_st1 | | | | | | | | | | | | | | | | | | | | | |
| hsa-miR- | hsa-asg- | 7.98 | 7.89 | 7.79 | 7.88 | 0.09 | 100 | 7.75 | 7.03 | 6.53 | 7.45 | 6.62 | 5.05 | 5.71 | 3.83 | 5.23 | 6.13 | 1.28 | 67 | 4.4E−02 | 1.75 | 3.4 |
| 140 | 14239_st1 | | | | | | | | | | | | | | | | | | | | | |
| hsa-miR- | hsa-miR- | 7.47 | 7.34 | 8.05 | 7.62 | 0.38 | 100 | 7.73 | 6.16 | 6.37 | 7.22 | 6.63 | 5.50 | 4.78 | 4.78 | 5.27 | 6.05 | 1.05 | 44 | 3.2E−02 | 1.57 | 3.0 |
| 140 | 140_st2 | | | | | | | | | | | | | | | | | | | | | |
| hsa-asg- | hsa-asg- | 9.43 | 9.72 | 9.27 | 9.47 | 0.23 | 100 | 8.19 | 8.66 | 6.70 | 7.94 | 8.49 | 8.41 | 6.99 | 7.05 | 7.13 | 7.73 | 0.76 | 100 | 3.3E−03 | 1.75 | 3.4 |
| 13613 | 13613_st2 | | | | | | | | | | | | | | | | | | | | | |
| hsa-asg- | hsa-asg- | 8.21 | 8.35 | 8.40 | 8.32 | 0.10 | 0 | 7.33 | 7.42 | 5.19 | 6.58 | 7.56 | 6.95 | 6.04 | 5.72 | 6.37 | 6.57 | 0.82 | 22 | 5.1E−03 | 1.74 | 3.4 |
| 175 | 175_st2 | | | | | | | | | | | | | | | | | | | | | |
| hsa-asg- | hsa-asg- | 9.55 | 9.67 | 9.28 | 9.50 | 0.20 | 100 | 8.20 | 8.88 | 7.05 | 7.56 | 8.07 | 8.62 | 6.89 | 7.34 | 7.23 | 7.76 | 0.71 | 89 | 2.3E−03 | 1.74 | 3.3 |
| 6766 | 6766_st1 | | | | | | | | | | | | | | | | | | | | | |
| hsa-asg- | hsa-asg- | 7.19 | 6.88 | 6.65 | 6.91 | 0.27 | 100 | 4.66 | 6.79 | 3.96 | 4.91 | 4.87 | 6.57 | 4.07 | 5.20 | 5.48 | 5.17 | 0.99 | 22 | 1.5E−02 | 1.74 | 3.3 |
| 6202 | 6202_st2 | | | | | | | | | | | | | | | | | | | | | |
| hsa-asg- | hsa-asg- | 8.19 | 8.63 | 8.38 | 8.40 | 0.22 | 100 | 6.65 | 7.75 | 5.21 | 6.64 | 7.46 | 7.73 | 6.02 | 6.26 | 6.26 | 6.66 | 0.85 | 89 | 6.8E−03 | 1.74 | 3.3 |
| 4070 | 4070_st2 | | | | | | | | | | | | | | | | | | | | | |
| hsa-asg- | hsa-asg- | 7.49 | 7.78 | 7.40 | 7.56 | 0.20 | 100 | 5.80 | 6.54 | 5.58 | 5.51 | 5.76 | 6.40 | 5.22 | 5.68 | 5.88 | 5.82 | 0.42 | 33 | 4.7E−05 | 1.74 | 3.3 |
| 5385 | 5385_st2 | | | | | | | | | | | | | | | | | | | | | |
| hsa-asg- | hsa-asg- | 7.14 | 7.30 | 6.46 | 6.97 | 0.44 | 100 | 6.16 | 5.88 | 4.58 | 4.33 | 5.80 | 6.69 | 4.20 | 4.11 | 5.33 | 5.23 | 0.96 | 33 | 1.4E−02 | 1.74 | 3.3 |
| 278 | 278_st1 | | | | | | | | | | | | | | | | | | | | | |
| hsa-miR- | hsa-miR- | 9.37 | 8.90 | 9.34 | 9.20 | 0.27 | 100 | 8.38 | 8.32 | 7.31 | 8.03 | 8.04 | 6.51 | 6.91 | 6.53 | 7.20 | 7.47 | 0.74 | 100 | 3.1E−03 | 1.73 | 3.3 |
| 19b | 19b_st2 | | | | | | | | | | | | | | | | | | | | | |
| hsa-asg- | hsa-asg- | 7.37 | 7.49 | 7.33 | 7.40 | 0.09 | 100 | 5.96 | 6.55 | 4.54 | 5.68 | 6.04 | 6.31 | 5.12 | 5.29 | 5.49 | 5.66 | 0.63 | 44 | 9.3E−04 | 1.73 | 3.3 |
| 5208 | 5208_st1 | | | | | | | | | | | | | | | | | | | | | |
| hsa-asg- | hsa-asg- | 6.93 | 7.63 | 6.81 | 7.12 | 0.44 | 100 | 5.48 | 6.13 | 5.12 | 5.30 | 5.10 | 6.20 | 4.82 | 4.98 | 5.40 | 5.39 | 0.48 | 0 | 2.7E−04 | 1.73 | 3.3 |
| 7027 | 7027_st2 | | | | | | | | | | | | | | | | | | | | | |
| hsa-asg- | hsa-asg- | 4.52 | 5.71 | 4.42 | 4.88 | 0.72 | 33 | 3.33 | 3.29 | 2.86 | 3.08 | 3.97 | 2.61 | 2.78 | 3.32 | 3.09 | 3.15 | 0.40 | 0 | 2.9E−04 | 1.73 | 3.3 |
| 2688 | 2688_st1 | | | | | | | | | | | | | | | | | | | | | |
| hsa-asg- | hsa-asg- | 6.97 | 7.11 | 6.91 | 7.00 | 0.11 | 100 | 5.35 | 6.18 | 4.61 | 4.88 | 5.73 | 5.89 | 4.78 | 5.26 | 4.73 | 5.27 | 0.56 | 22 | 4.5E−04 | 1.73 | 3.3 |
| 4703 | 4703_st2 | | | | | | | | | | | | | | | | | | | | | |
| hsa-asg- | hsa-asg- | 6.90 | 7.63 | 7.50 | 7.34 | 0.39 | 100 | 4.94 | 7.07 | 4.90 | 4.99 | 5.90 | 7.22 | 3.59 | 5.31 | 6.59 | 5.61 | 1.19 | 33 | 3.6E−02 | 1.73 | 3.3 |
| 12253 | 12253_st2 | | | | | | | | | | | | | | | | | | | | | |
| hsa-miR- | hsa-miR- | 11.2 | 11.1 | 11.0 | 11.14 | 0.07 | 100 | 10.9 | 10.3 | 8.69 | 10.0 | 9.47 | 9.34 | 9.58 | 7.33 | 9.03 | 9.42 | 1.03 | 100 | 1.8E−02 | 1.73 | 3.3 |
| 335 | 335_st1 | | | | | | | | | | | | | | | | | | | | | |
| hsa-asg- | hsa-asg- | 8.20 | 8.50 | 8.14 | 8.28 | 0.19 | 100 | 6.58 | 7.69 | 5.09 | 6.54 | 7.18 | 7.29 | 5.94 | 6.46 | 6.20 | 6.55 | 0.78 | 78 | 4.2E−03 | 1.73 | 3.3 |
| 9238 | 9238_st1 | | | | | | | | | | | | | | | | | | | | | |
| hsa-asg- | hsa-asg- | 6.38 | 6.75 | 6.46 | 6.53 | 0.20 | 100 | 5.11 | 5.46 | 4.02 | 4.84 | 5.66 | 5.63 | 4.54 | 4.35 | 3.65 | 4.80 | 0.72 | 0 | 2.6E−03 | 1.73 | 3.3 |
| 4207 | 4207_st1 | | | | | | | | | | | | | | | | | | | | | |
| hsa-asg- | hsa-asg- | 7.48 | 7.57 | 7.27 | 7.44 | 0.15 | 100 | 5.70 | 6.81 | 5.65 | 5.54 | 5.54 | 6.26 | 4.73 | 5.52 | 5.68 | 5.71 | 0.56 | 22 | 4.8E−04 | 1.72 | 3.3 |
| 8675 | 8675_st1 | | | | | | | | | | | | | | | | | | | | | |
| hsa-asg- | hsa-asg- | 8.97 | 9.27 | 9.10 | 9.11 | 0.15 | 100 | 7.28 | 8.53 | 5.47 | 7.03 | 8.25 | 8.67 | 6.58 | 7.10 | 7.58 | 7.39 | 1.02 | 89 | 1.7E−02 | 1.72 | 3.3 |
| 8221 | 8221_st2 | | | | | | | | | | | | | | | | | | | | | |
| hsa-asg- | hsa-asg- | 7.80 | 8.16 | 8.16 | 8.04 | 0.21 | 100 | 6.65 | 7.38 | 5.43 | 6.54 | 6.82 | 6.95 | 5.54 | 5.83 | 5.71 | 6.32 | 0.70 | 56 | 2.2E−03 | 1.72 | 3.3 |
| 3728 | 3728_st1 | | | | | | | | | | | | | | | | | | | | | |
| hsa-asg- | hsa-asg- | 9.27 | 9.84 | 9.44 | 9.52 | 0.30 | 100 | 7.47 | 9.02 | 5.98 | 7.51 | 9.08 | 8.86 | 7.01 | 7.49 | 7.76 | 7.80 | 1.03 | 89 | 1.9E−02 | 1.72 | 3.3 |
| 11572 | 11572_st2 | | | | | | | | | | | | | | | | | | | | | |
| hsa- | hsa- | 7.68 | 8.21 | 7.64 | 7.84 | 0.32 | 100 | 6.06 | 6.94 | 5.91 | 5.50 | 6.00 | 6.46 | 5.75 | 6.19 | 6.30 | 6.12 | 0.42 | 33 | 7.3E−05 | 1.72 | 3.3 |
| miR203 | miR203_st1 | | | | | | | | | | | | | | | | | | | | | |
| hsa-asg- | hsa-asg- | 9.76 | 10.0 | 9.88 | 9.88 | 0.12 | 100 | 8.58 | 9.00 | 7.30 | 8.04 | 8.85 | 9.00 | 7.45 | 8.12 | 7.15 | 8.16 | 0.74 | 100 | 2.9E−03 | 1.72 | 3.3 |
| 9248 | 9248_st2 | | | | | | | | | | | | | | | | | | | | | |
| hsa-asg- | hsa-asg- | 6.05 | 6.26 | 5.57 | 5.96 | 0.36 | 100 | 4.90 | 4.49 | 4.12 | 4.12 | 4.39 | 4.10 | 3.85 | 3.99 | 4.24 | 4.24 | 0.31 | 0 | 1.1E−05 | 1.72 | 3.3 |
| 11320 | 11320_st2 | | | | | | | | | | | | | | | | | | | | | |
| hsa-asg- | hsa-asg- | 9.04 | 9.32 | 9.12 | 9.16 | 0.14 | 100 | 7.52 | 8.18 | 6.66 | 7.34 | 8.01 | 7.83 | 6.60 | 7.58 | 7.32 | 7.45 | 0.55 | 100 | 3.8E−04 | 1.71 | 3.3 |
| 6339 | 6339_st1 | | | | | | | | | | | | | | | | | | | | | |
| hsa-asg- | hsa-asg- | 5.79 | 6.95 | 6.88 | 6.54 | 0.65 | 67 | 5.60 | 5.83 | 4.58 | 4.66 | 5.39 | 4.91 | 3.68 | 4.85 | 3.92 | 4.82 | 0.72 | 0 | 4.5E−03 | 1.71 | 3.3 |
| 2315 | 2315_st2 | | | | | | | | | | | | | | | | | | | | | |
| hsa-asg- | hsa-asg- | 5.27 | 7.24 | 7.11 | 6.54 | 1.10 | 67 | 4.99 | 5.01 | 4.84 | 3.46 | 5.12 | 5.05 | 4.86 | 5.52 | 4.63 | 4.83 | 0.57 | 0 | 4.6E−03 | 1.71 | 3.3 |
| 3754 | 3754_st2 | | | | | | | | | | | | | | | | | | | | | |
| hsa-asg- | hsa-asg- | 6.64 | 6.11 | 6.15 | 6.30 | 0.29 | 33 | 4.94 | 6.19 | 1.79 | 4.55 | 4.21 | 5.66 | 3.93 | 4.98 | 5.16 | 4.60 | 1.26 | 0 | 4.8E−02 | 1.70 | 3.2 |
| 11457 | 11457_st2 | | | | | | | | | | | | | | | | | | | | | |
| hsa-asg- | hsa-asg- | 5.99 | 6.25 | 6.32 | 6.19 | 0.17 | 33 | 4.55 | 5.73 | 3.60 | 4.19 | 5.15 | 5.13 | 3.40 | 4.55 | 4.11 | 4.49 | 0.76 | 11 | 3.9E−03 | 1.70 | 3.2 |
| 2193 | 2193_st1 | | | | | | | | | | | | | | | | | | | | | |
| hsa-asg- | hsa-asg- | 6.00 | 4.47 | 4.86 | 5.11 | 0.79 | 100 | 2.78 | 3.53 | 3.39 | 3.28 | 3.63 | 3.37 | 3.85 | 2.62 | 4.32 | 3.42 | 0.52 | 0 | 1.4E−03 | 1.69 | 3.2 |
| 11361 | 11361_st2 | | | | | | | | | | | | | | | | | | | | | |
| hsa-miR- | hsa-miR- | 7.55 | 7.90 | 7.36 | 7.60 | 0.27 | 100 | 6.73 | 6.17 | 5.12 | 5.83 | 6.14 | 6.15 | 5.56 | 6.04 | 5.44 | 5.91 | 0.48 | 56 | 2.0E−04 | 1.69 | 3.2 |
| 566 | 566_st1 | | | | | | | | | | | | | | | | | | | | | |
| hsa-asg- | hsa-asg- | 7.23 | 7.57 | 7.01 | 7.27 | 0.28 | 100 | 5.60 | 6.48 | 4.96 | 5.54 | 6.06 | 6.32 | 4.33 | 5.49 | 5.40 | 5.58 | 0.67 | 22 | 2.0E−03 | 1.69 | 3.2 |
| 13598 | 13598_st1 | | | | | | | | | | | | | | | | | | | | | |
| hsa-asg- | hsa-asg- | 9.06 | 9.47 | 9.17 | 9.23 | 0.21 | 100 | 8.02 | 8.36 | 6.10 | 7.65 | 8.39 | 8.46 | 6.99 | 7.26 | 6.64 | 7.54 | 0.85 | 89 | 7.7E−03 | 1.69 | 3.2 |
| 1240 | 1240_st1 | | | | | | | | | | | | | | | | | | | | | |
| hsa-asg- | hsa-asg- | 5.50 | 6.36 | 6.14 | 6.00 | 0.45 | 33 | 3.93 | 5.21 | 4.43 | 4.04 | 5.25 | 5.40 | 1.60 | 4.11 | 4.87 | 4.32 | 1.16 | 0 | 3.7E−02 | 1.69 | 3.2 |
| 13080 | 13080_st1 | | | | | | | | | | | | | | | | | | | | | |
| hsa-asg- | hsa-asg- | 8.79 | 10.1 | 10.2 | 9.74 | 0.83 | 100 | 9.00 | 8.68 | 7.46 | 8.25 | 8.89 | 8.41 | 7.19 | 7.78 | 6.83 | 8.06 | 0.77 | 100 | 9.2E−03 | 1.68 | 3.2 |
| 11523 | 11523_st1 | | | | | | | | | | | | | | | | | | | | | |
| hsa-asg- | hsa-asg- | 4.98 | 5.35 | 4.59 | 4.98 | 0.38 | 33 | 4.17 | 4.30 | 3.39 | 3.01 | 2.45 | 4.93 | 2.15 | 2.93 | 2.33 | 3.29 | 0.98 | 0 | 1.7E−02 | 1.68 | 3.2 |
| 115 | 115_st1 | | | | | | | | | | | | | | | | | | | | | |
| hsa-asg- | hsa-asg- | 8.58 | 8.78 | 8.40 | 8.59 | 0.19 | 100 | 6.86 | 7.57 | 6.93 | 7.11 | 7.11 | 7.65 | 6.71 | 5.80 | 6.45 | 6.91 | 0.56 | 89 | 6.0E−04 | 1.68 | 3.2 |
| 6129 | 6129_st2 | | | | | | | | | | | | | | | | | | | | | |
| hsa-asg- | hsa-asg- | 7.82 | 8.36 | 7.87 | 8.02 | 0.30 | 100 | 6.57 | 7.34 | 5.69 | 6.17 | 6.74 | 7.05 | 5.64 | 6.00 | 5.85 | 6.34 | 0.61 | 67 | 1.2E−03 | 1.68 | 3.2 |
| 8565 | 8565_st1 | | | | | | | | | | | | | | | | | | | | | |
| hsa-asg- | hsa-asg- | 10.1 | 10.3 | 10.1 | 10.23 | 0.13 | 100 | 9.06 | 9.46 | 7.05 | 8.60 | 9.34 | 9.24 | 7.92 | 8.47 | 7.84 | 8.55 | 0.82 | 100 | 6.4E−03 | 1.68 | 3.2 |
| 7662 | 7662_st1 | | | | | | | | | | | | | | | | | | | | | |
| hsa-asg- | hsa-asg- | 5.17 | 4.02 | 4.83 | 4.67 | 0.59 | 67 | 3.21 | 2.71 | 4.47 | 2.13 | 2.53 | 2.17 | 1.79 | 3.44 | 4.54 | 3.00 | 1.00 | 0 | 2.2E−02 | 1.67 | 3.2 |
| 280 | 280_st1 | | | | | | | | | | | | | | | | | | | | | |
| hsa-asg- | hsa-asg- | 8.43 | 8.35 | 8.07 | 8.28 | 0.19 | 100 | 6.62 | 7.91 | 6.02 | 5.97 | 6.72 | 7.54 | 5.35 | 6.71 | 6.65 | 6.61 | 0.79 | 78 | 5.3E−03 | 1.67 | 3.2 |
| 13870 | 13870_st2 | | | | | | | | | | | | | | | | | | | | | |
| hsa-asg- | hsa-asg- | 10.6 | 10.8 | 10.6 | 10.72 | 0.10 | 100 | 9.79 | 9.90 | 7.99 | 9.19 | 9.84 | 9.79 | 8.39 | 9.16 | 7.37 | 9.05 | 0.93 | 89 | 1.2E−02 | 1.67 | 3.2 |
| 7453 | 7453_st1 | | | | | | | | | | | | | | | | | | | | | |
| hsa-asg- | hsa-asg- | 7.18 | 7.55 | 7.28 | 7.34 | 0.19 | 100 | 6.66 | 6.55 | 4.58 | 5.63 | 6.20 | 6.20 | 4.86 | 5.49 | 4.87 | 5.67 | 0.78 | 44 | 5.1E−03 | 1.67 | 3.2 |
| 12246 | 12246_st2 | | | | | | | | | | | | | | | | | | | | | |
| hsa-asg- | hsa-asg- | 6.87 | 7.59 | 7.55 | 7.34 | 0.40 | 100 | 6.27 | 6.57 | 4.43 | 5.88 | 6.17 | 6.22 | 5.51 | 5.55 | 4.43 | 5.67 | 0.78 | 56 | 6.0E−03 | 1.67 | 3.2 |
| 8329 | 8329_st1 | | | | | | | | | | | | | | | | | | | | | |
| hsa-asg- | hsa-asg- | 5.75 | 6.50 | 5.96 | 6.07 | 0.39 | 100 | 5.11 | 4.91 | 3.54 | 4.19 | 5.07 | 4.75 | 4.14 | 4.41 | 3.53 | 4.40 | 0.61 | 0 | 1.3E−03 | 1.67 | 3.2 |
| 1227 | 1227_st1 | | | | | | | | | | | | | | | | | | | | | |
| hsa-asg- | hsa-asg- | 7.38 | 7.72 | 7.63 | 7.58 | 0.18 | 100 | 6.16 | 6.79 | 4.90 | 5.93 | 6.36 | 7.17 | 5.09 | 5.46 | 5.33 | 5.91 | 0.78 | 56 | 5.2E−03 | 1.67 | 3.2 |
| 11977 | 11977_st1 | | | | | | | | | | | | | | | | | | | | | |
| hsa-asg- | hsa-asg- | 6.02 | 6.21 | 6.41 | 6.21 | 0.20 | 100 | 3.66 | 5.40 | 3.39 | 4.69 | 4.63 | 5.64 | 3.93 | 4.14 | 5.46 | 4.55 | 0.83 | 0 | 7.2E−03 | 1.67 | 3.2 |
| 14185 | 14185_st1 | | | | | | | | | | | | | | | | | | | | | |
| hsa-asg- | hsa-asg- | 6.77 | 7.38 | 7.23 | 7.13 | 0.32 | 100 | 4.31 | 6.45 | 4.96 | 5.40 | 5.10 | 6.51 | 4.64 | 6.02 | 5.80 | 5.47 | 0.78 | 22 | 5.7E−03 | 1.66 | 3.2 |
| 2616 | 2616_st1 | | | | | | | | | | | | | | | | | | | | | |
| hsa-asg- | hsa-asg- | 6.97 | 6.59 | 6.31 | 6.62 | 0.33 | 100 | 4.66 | 6.87 | 3.91 | 4.08 | 4.70 | 6.22 | 3.29 | 5.11 | 5.84 | 4.96 | 1.17 | 22 | 3.9E−02 | 1.66 | 3.2 |
| 7461 | 7461_st2 | | | | | | | | | | | | | | | | | | | | | |
| hsa-asg- | hsa-asg- | 7.31 | 7.71 | 6.95 | 7.32 | 0.38 | 100 | 6.23 | 6.27 | 5.14 | 6.23 | 6.14 | 6.15 | 4.64 | 5.64 | 4.54 | 5.67 | 0.71 | 56 | 3.7E−03 | 1.66 | 3.2 |
| 809 | 809_st2 | | | | | | | | | | | | | | | | | | | | | |
| hsa-asg- | hsa-asg- | 4.52 | 5.77 | 5.67 | 5.32 | 0.70 | 67 | 4.24 | 3.64 | 1.92 | 4.08 | 4.58 | 4.89 | 3.05 | 3.32 | 3.25 | 3.66 | 0.90 | 0 | 1.6E−02 | 1.66 | 3.1 |
| 1270 | 1270_st2 | | | | | | | | | | | | | | | | | | | | | |
| hsa-asg- | hsa-asg- | 7.28 | 7.34 | 6.78 | 7.13 | 0.31 | 100 | 4.55 | 6.26 | 4.58 | 4.93 | 5.29 | 6.04 | 5.56 | 5.55 | 6.57 | 5.48 | 0.72 | 33 | 3.7E−03 | 1.65 | 3.1 |
| 6383 | 6383_st1 | | | | | | | | | | | | | | | | | | | | | |
| hsa-miR- | hsa-miR- | 6.22 | 7.18 | 6.37 | 6.59 | 0.51 | 100 | 5.51 | 4.91 | 4.61 | 4.81 | 5.70 | 5.09 | 3.77 | 5.22 | 4.84 | 4.94 | 0.56 | 22 | 1.1E−03 | 1.65 | 3.1 |
| 373* | 373-_st2 | | | | | | | | | | | | | | | | | | | | | |
| hsa-asg- | hsa-asg- | 8.11 | 9.28 | 7.99 | 8.46 | 0.71 | 100 | 7.15 | 7.06 | 5.28 | 7.31 | 8.20 | 7.17 | 6.33 | 6.55 | 6.27 | 6.81 | 0.82 | 89 | 1.1E−02 | 1.65 | 3.1 |
| 7063 | 7063_st1 | | | | | | | | | | | | | | | | | | | | | |
| hsa-asg- | hsa-asg- | 9.84 | 10.0 | 9.85 | 9.92 | 0.13 | 100 | 8.93 | 9.20 | 7.34 | 8.04 | 8.38 | 9.11 | 7.51 | 8.24 | 7.72 | 8.27 | 0.69 | 11 | 2.6E−03 | 1.65 | 3.1 |
| 11714 | 11714_st2 | | | | | | | | | | | | | | | | | | | | | |
| hsa-asg- | hsa-asg- | 9.60 | 10.2 | 10.3 | 10.07 | 0.41 | 100 | 9.22 | 9.15 | 7.53 | 8.49 | 9.15 | 9.26 | 7.83 | 8.17 | 6.97 | 8.42 | 0.85 | 22 | 9.9E−03 | 1.65 | 3.1 |
| 4654 | 4654_st1 | | | | | | | | | | | | | | | | | | | | | |
| hsa-asg- | hsa-asg- | 7.50 | 8.33 | 7.60 | 7.81 | 0.45 | 100 | 6.22 | 7.15 | 4.96 | 6.21 | 6.66 | 7.41 | 5.43 | 6.00 | 5.48 | 6.17 | 0.81 | 56 | 8.4E−03 | 1.64 | 3.1 |
| 11982 | 11982_st1 | | | | | | | | | | | | | | | | | | | | | |
| hsa-miR- | hsa-miR- | 8.03 | 6.27 | 7.57 | 7.29 | 0.91 | 100 | 5.14 | 5.04 | 6.67 | 6.09 | 6.11 | 5.17 | 5.92 | 5.45 | 5.27 | 5.65 | 0.57 | 44 | 3.5E−03 | 1.64 | 3.1 |
| 409-5p | 409-5p_st1 | | | | | | | | | | | | | | | | | | | | | |
| hsa-asg- | hsa-asg- | 8.22 | 9.15 | 9.25 | 8.87 | 0.57 | 100 | 7.95 | 7.98 | 5.88 | 7.27 | 8.06 | 7.86 | 6.79 | 7.20 | 6.10 | 7.23 | 0.83 | 78 | 1.0E−02 | 1.64 | 3.1 |
| 8638 | 8638_st1 | | | | | | | | | | | | | | | | | | | | | |
| hsa- | hsa- | 10.2 | 10.3 | 10.2 | 10.29 | 0.08 | 100 | 9.51 | 9.63 | 7.62 | 8.93 | 9.28 | 9.44 | 7.71 | 8.44 | 7.30 | 8.65 | 0.91 | 44 | 1.3E−02 | 1.64 | 3.1 |
| cand711 | cand711_st1 | | | | | | | | | | | | | | | | | | | | | |
| hsa-asg- | hsa-asg- | 9.59 | 9.92 | 9.63 | 9.71 | 0.18 | 100 | 8.45 | 9.07 | 6.96 | 8.06 | 8.65 | 8.64 | 7.39 | 7.93 | 7.55 | 8.08 | 0.69 | 100 | 2.7E−03 | 1.63 | 3.1 |
| 826 | 826_st1 | | | | | | | | | | | | | | | | | | | | | |
| hsa-asg- | hsa-asg- | 4.88 | 4.31 | 4.93 | 4.71 | 0.35 | 67 | 3.07 | 1.96 | 3.54 | 3.52 | 2.83 | 1.97 | 3.40 | 2.78 | 4.60 | 3.07 | 0.83 | 0 | 8.7E−03 | 1.63 | 3.1 |
| 548 | 548_st1 | | | | | | | | | | | | | | | | | | | | | |
| hsa-asg- | hsa-asg- | 7.39 | 7.74 | 7.22 | 7.45 | 0.27 | 100 | 4.71 | 6.92 | 4.43 | 6.11 | 6.19 | 6.94 | 5.43 | 5.43 | 6.19 | 5.82 | 0.89 | 33 | 1.2E−02 | 1.63 | 3.1 |
| 9126 | 9126_st2 | | | | | | | | | | | | | | | | | | | | | |
| hsa-asg- | hsa-asg- | 5.62 | 5.83 | 5.67 | 5.71 | 0.11 | 100 | 3.45 | 5.64 | 3.06 | 4.00 | 3.28 | 4.49 | 3.68 | 4.41 | 4.73 | 4.08 | 0.82 | 11 | 7.7E−03 | 1.63 | 3.1 |
| 201 | 201_st2 | | | | | | | | | | | | | | | | | | | | | |
| hsa-asg- | hsa-asg- | 9.45 | 9.99 | 9.36 | 9.60 | 0.34 | 100 | 7.66 | 8.87 | 6.73 | 7.75 | 8.75 | 8.82 | 7.35 | 7.81 | 8.03 | 7.97 | 0.73 | 100 | 4.4E−03 | 1.63 | 3.1 |
| 9867 | 9867_st2 | | | | | | | | | | | | | | | | | | | | | |
| hsa-asg- | hsa-asg- | 9.28 | 9.28 | 8.98 | 9.18 | 0.17 | 100 | 7.11 | 8.71 | 6.59 | 7.22 | 7.65 | 8.74 | 6.71 | 7.51 | 7.73 | 7.55 | 0.77 | 100 | 5.4E−03 | 1.63 | 3.1 |
| 11818 | 11818_st2 | | | | | | | | | | | | | | | | | | | | | |
| hsa-asg- | hsa-asg- | 7.98 | 8.39 | 8.09 | 8.15 | 0.22 | 100 | 6.16 | 8.26 | 6.15 | 5.96 | 6.31 | 8.06 | 6.07 | 6.00 | 5.77 | 6.53 | 0.94 | 56 | 1.6E−02 | 1.63 | 3.1 |
| 8548 | 8548_st1 | | | | | | | | | | | | | | | | | | | | | |
| hsa-asg- | hsa-asg- | 5.69 | 4.81 | 5.23 | 5.24 | 0.44 | 67 | 3.07 | 4.99 | 2.66 | 3.34 | 3.33 | 5.25 | 3.17 | 2.78 | 3.97 | 3.62 | 0.93 | 0 | 1.7E−02 | 1.62 | 3.1 |
| 3236 | 3236_st1 | | | | | | | | | | | | | | | | | | | | | |
| hsa-asg- | hsa-asg- | 7.39 | 7.97 | 7.06 | 7.47 | 0.46 | 100 | 6.32 | 6.69 | 4.90 | 5.17 | 6.46 | 6.73 | 5.19 | 5.76 | 5.44 | 5.85 | 0.71 | 44 | 4.5E−03 | 1.62 | 3.1 |
| 1911 | 1911_st1 | | | | | | | | | | | | | | | | | | | | | |
| hsa- | hsa- | 7.71 | 7.75 | 7.68 | 7.72 | 0.04 | 100 | 6.75 | 7.27 | 5.91 | 5.65 | 6.24 | 6.29 | 5.05 | 6.14 | 5.58 | 6.10 | 0.66 | 56 | 2.0E−03 | 1.62 | 3.1 |
| cand173 | cand173_st1 | | | | | | | | | | | | | | | | | | | | | |
| hsa-asg- | hsa-asg- | 10.0 | 10.4 | 10.0 | 10.17 | 0.22 | 100 | 8.95 | 9.67 | 7.70 | 8.60 | 9.03 | 9.53 | 7.87 | 8.01 | 7.68 | 8.56 | 0.78 | 100 | 6.2E−03 | 1.61 | 3.1 |
| 6367 | 6367_st1 | | | | | | | | | | | | | | | | | | | | | |
| hsa-asg- | hsa-asg- | 8.49 | 9.04 | 8.60 | 8.71 | 0.29 | 100 | 7.57 | 7.91 | 5.94 | 7.28 | 7.81 | 7.85 | 6.09 | 6.63 | 6.83 | 7.10 | 0.76 | 89 | 5.8E−03 | 1.61 | 3.1 |
| 11252 | 11252_st2 | | | | | | | | | | | | | | | | | | | | | |
| hsa-asg- | hsa-asg- | 9.94 | 10.0 | 9.68 | 9.87 | 0.17 | 100 | 8.06 | 9.32 | 7.83 | 7.72 | 8.40 | 9.35 | 7.31 | 8.76 | 7.65 | 8.27 | 0.74 | 22 | 4.7E−03 | 1.61 | 3.0 |
| 11193 | 11193_st1 | | | | | | | | | | | | | | | | | | | | | |
| hsa-asg- | hsa-asg- | 5.92 | 5.86 | 4.93 | 5.57 | 0.55 | 67 | 3.45 | 5.37 | 3.06 | 3.95 | 4.00 | 4.75 | 2.32 | 4.21 | 4.54 | 3.96 | 0.92 | 0 | 1.8E−02 | 1.61 | 3.0 |
| 11760 | 11760_st1 | | | | | | | | | | | | | | | | | | | | | |
| hsa-asg- | hsa-asg- | 9.93 | 10.5 | 10.2 | 10.22 | 0.29 | 100 | 8.18 | 9.56 | 7.37 | 8.18 | 9.40 | 9.45 | 7.83 | 8.06 | 9.52 | 8.62 | 0.85 | 100 | 1.1E−02 | 1.61 | 3.0 |
| 6870 | 6870_st1 | | | | | | | | | | | | | | | | | | | | | |
| hsa-asg- | hsa-asg- | 5.68 | 5.66 | 5.54 | 5.63 | 0.08 | 0 | 2.61 | 5.83 | 3.85 | 2.77 | 2.97 | 5.20 | 3.93 | 4.25 | 4.76 | 4.02 | 1.11 | 11 | 3.6E−02 | 1.61 | 3.0 |
| 1416 | 1416_st1 | | | | | | | | | | | | | | | | | | | | | |
| hsa-asg- | hsa-asg- | 6.96 | 7.89 | 7.76 | 7.54 | 0.50 | 100 | 5.92 | 6.72 | 5.43 | 5.43 | 6.44 | 6.53 | 5.49 | 6.15 | 5.29 | 5.93 | 0.55 | 44 | 1.1E−03 | 1.61 | 3.0 |
| 7293 | 7293_st1 | | | | | | | | | | | | | | | | | | | | | |
| hsa-asg- | hsa-asg- | 9.18 | 9.76 | 9.52 | 9.48 | 0.29 | 67 | 8.31 | 8.61 | 7.13 | 7.79 | 8.22 | 8.77 | 6.91 | 7.75 | 7.47 | 7.88 | 0.64 | 0 | 2.2E−03 | 1.60 | 3.0 |
| 2290 | 2290_st2 | | | | | | | | | | | | | | | | | | | | | |
| hsa-asg- | hsa-asg- | 7.44 | 7.94 | 7.80 | 7.73 | 0.26 | 100 | 6.35 | 7.13 | 4.84 | 6.33 | 6.45 | 6.97 | 5.02 | 5.94 | 6.10 | 6.13 | 0.78 | 56 | 6.7E−03 | 1.60 | 3.0 |
| 8956 | 8956_st1 | | | | | | | | | | | | | | | | | | | | | |
| hsa-asg- | hsa-asg- | 4.42 | 5.30 | 5.06 | 4.93 | 0.46 | 67 | 4.37 | 3.29 | 2.86 | 4.81 | 3.16 | 2.85 | 2.32 | 3.07 | 3.25 | 3.33 | 0.78 | 0 | 8.0E−03 | 1.60 | 3.0 |
| 1619 | 1619_st2 | | | | | | | | | | | | | | | | | | | | | |
| hsa-asg- | hsa-asg- | 7.72 | 7.79 | 7.44 | 7.65 | 0.19 | 100 | 6.39 | 6.71 | 5.26 | 6.03 | 6.76 | 6.35 | 5.35 | 6.08 | 5.64 | 6.06 | 0.55 | 56 | 7.4E−04 | 1.59 | 3.0 |
| 14025 | 14025_st1 | | | | | | | | | | | | | | | | | | | | | |
| hsa-asg- | hsa-asg- | 9.85 | 10.0 | 9.73 | 9.86 | 0.14 | 100 | 8.34 | 9.16 | 7.56 | 7.88 | 8.40 | 9.24 | 7.68 | 8.78 | 7.46 | 8.28 | 0.68 | 11 | 2.9E−03 | 1.59 | 3.0 |
| 9150 | 9150_st1 | | | | | | | | | | | | | | | | | | | | | |
| hsa-asg- | hsa-asg- | 8.15 | 8.23 | 7.91 | 8.09 | 0.17 | 100 | 6.75 | 7.58 | 5.72 | 5.95 | 6.52 | 7.25 | 5.92 | 6.81 | 6.06 | 6.51 | 0.64 | 89 | 2.1E−03 | 1.59 | 3.0 |
| 11089 | 11089_st1 | | | | | | | | | | | | | | | | | | | | | |
| hsa-asg- | hsa-asg- | 6.25 | 6.54 | 6.49 | 6.43 | 0.16 | 33 | 4.37 | 6.05 | 3.85 | 4.15 | 5.07 | 5.76 | 4.69 | 4.76 | 4.87 | 4.84 | 0.71 | 0 | 4.0E−03 | 1.58 | 3.0 |
| 7043 | 7043_st2 | | | | | | | | | | | | | | | | | | | | | |
| hsa-asg- | hsa-asg- | 8.54 | 8.77 | 8.37 | 8.56 | 0.20 | 100 | 7.04 | 7.93 | 5.85 | 6.64 | 7.74 | 7.80 | 6.81 | 6.26 | 6.73 | 6.98 | 0.72 | 89 | 4.4E−03 | 1.58 | 3.0 |
| 9412 | 9412_st2 | | | | | | | | | | | | | | | | | | | | | |
| hsa-asg- | hsa-asg- | 7.81 | 7.78 | 7.48 | 7.69 | 0.18 | 100 | 5.32 | 7.35 | 5.30 | 5.25 | 6.40 | 7.47 | 5.46 | 5.27 | 7.12 | 6.11 | 0.98 | 44 | 2.2E−02 | 1.58 | 3.0 |
| 10199 | 10199_st1 | | | | | | | | | | | | | | | | | | | | | |
| hsa-miR- | hsa-miR- | 10.4 | 10.0 | 10.6 | 10.38 | 0.27 | 100 | 9.62 | 9.27 | 8.82 | 9.68 | 9.16 | 8.64 | 7.76 | 7.45 | 8.75 | 8.80 | 0.77 | 100 | 6.7E−03 | 1.58 | 3.0 |
| 218 | 218_st2 | | | | | | | | | | | | | | | | | | | | | |
| hsa- | hsa- | 8.79 | 9.07 | 8.87 | 8.91 | 0.15 | 67 | 7.73 | 8.07 | 5.92 | 7.30 | 7.94 | 7.95 | 6.88 | 7.46 | 6.72 | 7.33 | 0.71 | 56 | 4.0E−03 | 1.58 | 3.0 |
| cand441 | cand441_st2 | | | | | | | | | | | | | | | | | | | | | |
| hsa-asg- | hsa-asg- | 6.83 | 7.28 | 7.30 | 7.14 | 0.27 | 100 | 5.14 | 6.43 | 4.26 | 5.25 | 6.01 | 6.74 | 4.54 | 5.58 | 6.06 | 5.56 | 0.84 | 33 | 1.0E−02 | 1.58 | 3.0 |
| 1239 | 1239_st1 | | | | | | | | | | | | | | | | | | | | | |
| hsa-asg- | hsa-asg- | 8.39 | 8.95 | 8.78 | 8.70 | 0.29 | 100 | 7.41 | 8.45 | 5.88 | 7.35 | 7.66 | 8.16 | 6.12 | 6.92 | 6.21 | 7.13 | 0.91 | 89 | 1.7E−02 | 1.57 | 3.0 |
| 6437 | 6437_st1 | | | | | | | | | | | | | | | | | | | | | |
| hsa- | hsa- | 6.78 | 7.49 | 7.16 | 7.14 | 0.36 | 100 | 5.73 | 6.67 | 4.17 | 5.25 | 6.20 | 6.52 | 4.73 | 5.63 | 5.25 | 5.57 | 0.82 | 33 | 1.0E−02 | 1.57 | 3.0 |
| cand484 | cand484_st2 | | | | | | | | | | | | | | | | | | | | | |
| hsa-asg- | hsa-asg- | 8.58 | 8.94 | 8.48 | 8.66 | 0.25 | 100 | 7.24 | 8.15 | 5.85 | 6.82 | 7.42 | 8.35 | 6.47 | 7.54 | 5.98 | 7.09 | 0.88 | 89 | 1.4E−02 | 1.57 | 3.0 |
| 9713 | 9713_st1 | | | | | | | | | | | | | | | | | | | | | |
| hsa- | hsa- | 6.73 | 7.08 | 6.53 | 6.78 | 0.28 | 100 | 4.85 | 5.82 | 4.54 | 5.35 | 4.70 | 5.93 | 4.38 | 5.56 | 5.75 | 5.21 | 0.60 | 11 | 1.5E−03 | 1.57 | 3.0 |
| cand676 | cand676_st2 | | | | | | | | | | | | | | | | | | | | | |
| hsa-asg- | hsa-asg- | 8.27 | 8.37 | 7.97 | 8.20 | 0.21 | 100 | 6.65 | 7.78 | 6.17 | 6.40 | 6.67 | 7.58 | 5.69 | 6.91 | 5.88 | 6.64 | 0.71 | 100 | 4.3E−03 | 1.57 | 3.0 |
| 9130 | 9130_st2 | | | | | | | | | | | | | | | | | | | | | |
| hsa-asg- | hsa-asg- | 10.6 | 10.9 | 10.5 | 10.71 | 0.18 | 100 | 8.88 | 10.0 | 8.27 | 8.95 | 9.79 | 9.84 | 8.28 | 8.92 | 9.35 | 9.14 | 0.65 | 78 | 2.4E−03 | 1.57 | 3.0 |
| 377 | 377_st2 | | | | | | | | | | | | | | | | | | | | | |
| hsa-asg- | hsa-asg- | 6.42 | 7.09 | 6.80 | 6.77 | 0.34 | 100 | 6.32 | 5.04 | 3.91 | 5.10 | 6.23 | 4.65 | 5.05 | 6.32 | 4.24 | 5.21 | 0.90 | 33 | 1.7E−02 | 1.56 | 3.0 |
| 8280 | 8280_st2 | | | | | | | | | | | | | | | | | | | | | |
| hsa-asg- | hsa-asg- | 7.14 | 7.11 | 7.03 | 7.09 | 0.05 | 100 | 5.32 | 6.42 | 5.06 | 5.06 | 5.46 | 6.52 | 4.14 | 5.80 | 6.01 | 5.53 | 0.75 | 33 | 5.8E−03 | 1.56 | 2.9 |
| 114 | 114_st2 | | | | | | | | | | | | | | | | | | | | | |
| hsa- | hsa- | 5.56 | 6.20 | 5.84 | 5.87 | 0.32 | 100 | 4.76 | 4.71 | 4.30 | 4.33 | 4.39 | 4.55 | 3.77 | 3.44 | 4.54 | 4.31 | 0.44 | 0 | 2.2E−04 | 1.56 | 2.9 |
| cand239 | cand239_st2 | | | | | | | | | | | | | | | | | | | | | |
| hsa-asg- | hsa-asg- | 5.17 | 5.75 | 5.43 | 5.45 | 0.29 | 100 | 3.45 | 4.99 | 3.06 | 3.73 | 4.42 | 4.70 | 3.40 | 3.44 | 3.87 | 3.89 | 0.66 | 11 | 3.2E−03 | 1.56 | 2.9 |
| 3829 | 3829_st1 | | | | | | | | | | | | | | | | | | | | | |
| hsa-miR- | hsa-miR- | 6.00 | 3.48 | 2.64 | 4.04 | 1.75 | 33 | 3.33 | 2.87 | 2.43 | 2.60 | 3.22 | 1.29 | 2.64 | 2.62 | 1.38 | 2.49 | 0.72 | 0 | 4.3E−02 | 1.55 | 2.9 |
| 383 | 383_st1 | | | | | | | | | | | | | | | | | | | | | |
| hsa-asg- | hsa-asg- | 10.4 | 10.8 | 10.0 | 10.41 | 0.40 | 100 | 9.07 | 9.37 | 7.35 | 9.28 | 10.0 | 9.45 | 8.23 | 8.58 | 8.34 | 8.86 | 0.81 | 100 | 1.0E−02 | 1.55 | 2.9 |
| 3591 | 3591_st1 | | | | | | | | | | | | | | | | | | | | | |
| hsa-asg- | hsa-asg- | 5.82 | 6.58 | 6.48 | 6.29 | 0.41 | 67 | 5.14 | 4.52 | 3.85 | 4.79 | 4.89 | 4.43 | 3.68 | 5.60 | 5.74 | 4.74 | 0.71 | 0 | 5.3E−03 | 1.55 | 2.9 |
| 9492 | 9492_st1 | | | | | | | | | | | | | | | | | | | | | |
| hsa-asg- | hsa-asg- | 7.09 | 7.81 | 7.84 | 7.58 | 0.42 | 100 | 6.16 | 6.85 | 5.26 | 5.78 | 6.57 | 6.69 | 5.59 | 5.58 | 5.77 | 6.03 | 0.57 | 44 | 1.5E−03 | 1.55 | 2.9 |
| 1168 | 1168_st1 | | | | | | | | | | | | | | | | | | | | | |
| hsa-asg- | hsa-asg- | 7.14 | 7.25 | 6.75 | 7.05 | 0.27 | 100 | 4.71 | 6.60 | 3.85 | 5.27 | 6.00 | 7.27 | 5.29 | 5.27 | 5.25 | 5.50 | 1.01 | 22 | 2.8E−02 | 1.55 | 2.9 |
| 8450 | 8450_st1 | | | | | | | | | | | | | | | | | | | | | |
| hsa-asg- | hsa-asg- | 7.58 | 8.24 | 7.94 | 7.92 | 0.33 | 100 | 6.49 | 7.44 | 4.58 | 6.28 | 6.87 | 7.36 | 6.30 | 6.17 | 5.85 | 6.37 | 0.86 | 78 | 1.4E−02 | 1.55 | 2.9 |
| 7218 | 7218_st1 | | | | | | | | | | | | | | | | | | | | | |
| hsa-miR- | hsa-miR- | 5.00 | 3.20 | 4.11 | 4.10 | 0.90 | 33 | 2.61 | 1.75 | 2.66 | 2.93 | 3.44 | 1.97 | 3.29 | 3.00 | 1.38 | 2.56 | 0.71 | 0 | 1.1E−02 | 1.54 | 2.9 |
| 369-3p | 369-3p_st1 | | | | | | | | | | | | | | | | | | | | | |
| hsa-asg- | hsa-asg- | 6.71 | 7.41 | 6.75 | 6.96 | 0.40 | 100 | 5.89 | 6.45 | 4.17 | 5.37 | 5.90 | 6.27 | 4.38 | 5.68 | 4.63 | 5.42 | 0.83 | 0 | 1.2E−02 | 1.54 | 2.9 |
| 5272 | 5272_st2 | | | | | | | | | | | | | | | | | | | | | |
| hsa-asg- | hsa-asg- | 6.49 | 7.05 | 6.74 | 6.76 | 0.28 | 67 | 5.85 | 6.15 | 5.30 | 5.12 | 4.70 | 4.73 | 4.73 | 4.80 | 5.58 | 5.22 | 0.54 | 0 | 9.3E−04 | 1.54 | 2.9 |
| 6961 | 6961_st2 | | | | | | | | | | | | | | | | | | | | | |
| hsa-asg- | hsa-asg- | 7.94 | 7.43 | 7.46 | 7.61 | 0.29 | 0 | 5.60 | 6.42 | 6.43 | 6.33 | 5.78 | 6.22 | 6.76 | 5.42 | 5.63 | 6.06 | 0.47 | 11 | 3.5E−04 | 1.54 | 2.9 |
| 8476 | 8476_st1 | | | | | | | | | | | | | | | | | | | | | |
| hsa-asg- | hsa-asg- | 6.43 | 7.39 | 6.58 | 6.80 | 0.52 | 67 | 5.29 | 6.23 | 3.85 | 5.16 | 5.96 | 6.09 | 4.44 | 5.20 | 5.12 | 5.26 | 0.77 | 0 | 1.0E−02 | 1.54 | 2.9 |
| 9124 | 9124_st1 | | | | | | | | | | | | | | | | | | | | | |
| hsa-asg- | hsa-asg- | 7.09 | 7.76 | 7.08 | 7.31 | 0.39 | 100 | 6.80 | 6.91 | 4.43 | 5.78 | 6.24 | 6.73 | 4.98 | 5.68 | 4.36 | 5.77 | 1.00 | 44 | 2.9E−02 | 1.54 | 2.9 |
| 9577 | 9577_st1 | | | | | | | | | | | | | | | | | | | | | |
| hsa-asg- | hsa-asg- | 7.84 | 8.39 | 8.21 | 8.15 | 0.28 | 100 | 6.42 | 7.58 | 6.33 | 6.06 | 6.93 | 7.47 | 5.32 | 7.06 | 6.28 | 6.60 | 0.72 | 89 | 5.6E−03 | 1.54 | 2.9 |
| 5399 | 5399_st1 | | | | | | | | | | | | | | | | | | | | | |
| hsa-asg- | hsa-asg- | 7.38 | 8.04 | 7.51 | 7.64 | 0.35 | 100 | 5.89 | 7.10 | 5.30 | 6.16 | 6.68 | 7.29 | 5.40 | 5.98 | 5.12 | 6.10 | 0.78 | 44 | 9.2E−03 | 1.54 | 2.9 |
| 10815 | 10815_st1 | | | | | | | | | | | | | | | | | | | | | |
| hsa-asg- | hsa-asg- | 7.78 | 8.42 | 8.12 | 8.11 | 0.32 | 100 | 7.22 | 7.23 | 5.79 | 6.81 | 6.62 | 7.01 | 5.90 | 6.21 | 6.36 | 6.57 | 0.54 | 89 | 1.0E−03 | 1.54 | 2.9 |
| 14066 | 14066_st2 | | | | | | | | | | | | | | | | | | | | | |
| hsa-asg- | hsa-asg- | 8.55 | 9.35 | 9.47 | 9.12 | 0.50 | 100 | 8.15 | 8.15 | 5.74 | 7.66 | 8.37 | 7.69 | 7.27 | 8.33 | 6.92 | 7.59 | 0.85 | 89 | 1.5E−02 | 1.54 | 2.9 |
| 109 | 109_st1 | | | | | | | | | | | | | | | | | | | | | |
| hsa-asg- | hsa-asg- | 9.51 | 9.67 | 9.49 | 9.55 | 0.10 | 100 | 8.95 | 8.90 | 7.30 | 7.84 | 8.41 | 8.62 | 6.90 | 8.10 | 7.18 | 8.02 | 0.76 | 100 | 7.2E−03 | 1.53 | 2.9 |
| 9625 | 9625_st2 | | | | | | | | | | | | | | | | | | | | | |
| hsa-asg- | hsa-asg- | 7.33 | 7.35 | 7.42 | 7.37 | 0.05 | 100 | 5.85 | 6.91 | 5.98 | 5.32 | 5.63 | 6.32 | 4.49 | 6.47 | 5.53 | 5.83 | 0.71 | 44 | 4.6E−03 | 1.53 | 2.9 |
| 8003 | 8003_st2 | | | | | | | | | | | | | | | | | | | | | |
| hsa-miR-31 | hsa-miR- | 11.7 | 9.58 | 11.0 | 10.77 | 1.08 | 100 | 10.4 | 9.79 | 8.95 | 10.1 | 8.71 | 8.60 | 7.73 | 8.68 | 10.1 | 9.23 | 0.91 | 100 | 3.5E−02 | 1.53 | 2.9 |
| | 31_st2 | | | | | | | | | | | | | | | | | | | | | |
| hsa-asg- | hsa-asg- | 5.17 | 5.95 | 5.41 | 5.51 | 0.40 | 67 | 3.85 | 4.86 | 3.79 | 3.57 | 3.59 | 4.93 | 3.17 | 4.07 | 3.97 | 3.98 | 0.58 | 0 | 1.9E−03 | 1.53 | 2.9 |
| 12271 | 12271_st1 | | | | | | | | | | | | | | | | | | | | | |
| hsa-asg- | hsa-asg- | 7.94 | 8.45 | 8.15 | 8.18 | 0.26 | 0 | 6.06 | 7.50 | 5.53 | 6.41 | 7.50 | 7.38 | 6.23 | 6.85 | 6.37 | 6.65 | 0.70 | 22 | 4.8E−03 | 1.53 | 2.9 |
| 9165 | 9165_st1 | | | | | | | | | | | | | | | | | | | | | |
| hsa-asg- | hsa-asg- | 8.22 | 8.45 | 8.38 | 8.35 | 0.11 | 100 | 6.88 | 7.76 | 5.94 | 6.48 | 7.13 | 7.43 | 5.84 | 6.82 | 7.12 | 6.82 | 0.64 | 78 | 2.6E−03 | 1.53 | 2.9 |
| 4847 | 4847_st1 | | | | | | | | | | | | | | | | | | | | | |
| hsa-asg- | hsa-asg- | 8.33 | 7.80 | 7.43 | 7.85 | 0.45 | 100 | 6.96 | 7.57 | 5.82 | 5.51 | 6.76 | 7.05 | 5.80 | 6.44 | 5.02 | 6.33 | 0.83 | 67 | 1.4E−02 | 1.53 | 2.9 |
| 8991 | 8991_st2 | | | | | | | | | | | | | | | | | | | | | |
| hsa-miR- | hsa-miR- | 10.1 | 10.0 | 10.0 | 10.08 | 0.06 | 100 | 9.33 | 9.03 | 8.26 | 9.31 | 8.40 | 9.13 | 7.93 | 7.39 | 8.19 | 8.55 | 0.68 | 100 | 3.7E−03 | 1.53 | 2.9 |
| 30a-3p | 30a-3p_st1 | | | | | | | | | | | | | | | | | | | | | |
| hsa-asg- | hsa-asg- | 7.60 | 8.21 | 7.87 | 7.89 | 0.31 | 100 | 6.84 | 7.40 | 5.49 | 6.59 | 6.90 | 7.28 | 5.37 | 5.79 | 5.66 | 6.37 | 0.79 | 56 | 9.9E−03 | 1.53 | 2.9 |
| 12953 | 12953_st2 | | | | | | | | | | | | | | | | | | | | | |
| hsa-asg- | hsa-asg- | 6.91 | 7.46 | 6.94 | 7.10 | 0.31 | 100 | 5.29 | 6.33 | 5.39 | 5.54 | 6.03 | 6.45 | 4.86 | 5.60 | 4.70 | 5.58 | 0.61 | 22 | 2.2E−03 | 1.52 | 2.9 |
| 7336 | 7336_st1 | | | | | | | | | | | | | | | | | | | | | |
| hsa-asg- | hsa-asg- | 9.75 | 10.2 | 9.56 | 9.86 | 0.37 | 100 | 8.43 | 9.00 | 6.93 | 8.12 | 9.37 | 8.94 | 7.81 | 8.27 | 8.15 | 8.34 | 0.73 | 100 | 6.6E−03 | 1.52 | 2.9 |
| 3539 | 3539_st2 | | | | | | | | | | | | | | | | | | | | | |
| hsa-asg- | hsa-asg- | 6.07 | 5.75 | 5.98 | 5.93 | 0.16 | 100 | 5.03 | 5.49 | 3.06 | 3.46 | 5.42 | 5.27 | 2.78 | 4.87 | 4.32 | 4.41 | 1.06 | 0 | 3.6E−02 | 1.52 | 2.9 |
| 4261 | 4261_st1 | | | | | | | | | | | | | | | | | | | | | |
| hsa-asg- | hsa-asg- | 6.33 | 7.36 | 6.68 | 6.79 | 0.52 | 100 | 4.55 | 6.56 | 4.68 | 5.02 | 5.07 | 5.98 | 4.90 | 5.19 | 5.49 | 5.27 | 0.64 | 11 | 4.3E−03 | 1.52 | 2.9 |
| 1337 | 1337_st1 | | | | | | | | | | | | | | | | | | | | | |
| hsa- | hsa- | 5.84 | 7.44 | 7.50 | 6.93 | 0.94 | 67 | 5.51 | 6.13 | 4.96 | 4.71 | 5.17 | 6.07 | 5.69 | 5.31 | 5.12 | 5.41 | 0.49 | 0 | 3.6E−03 | 1.52 | 2.9 |
| miR223 | miR223_st2 | | | | | | | | | | | | | | | | | | | | | |
| hsa-asg- | hsa-asg- | 6.04 | 6.44 | 6.54 | 6.34 | 0.27 | 33 | 2.78 | 6.32 | 3.60 | 4.71 | 4.70 | 5.74 | 4.49 | 5.24 | 5.82 | 4.82 | 1.12 | 0 | 4.7E−02 | 1.52 | 2.9 |
| 4850 | 4850_st2 | | | | | | | | | | | | | | | | | | | | | |
| hsa-asg- | hsa-asg- | 9.87 | 10.1 | 10.1 | 10.07 | 0.17 | 100 | 9.63 | 9.43 | 7.58 | 8.40 | 9.30 | 8.97 | 7.96 | 8.90 | 6.78 | 8.55 | 0.95 | 100 | 2.3E−02 | 1.52 | 2.9 |
| 1726 | 1726_st1 | | | | | | | | | | | | | | | | | | | | | |
| hsa-asg- | hsa-asg- | 6.85 | 7.60 | 7.03 | 7.16 | 0.39 | 100 | 6.12 | 6.35 | 5.55 | 5.06 | 5.97 | 6.37 | 5.16 | 5.09 | 5.12 | 5.64 | 0.56 | 33 | 1.6E−03 | 1.52 | 2.9 |
| 5735 | 5735_st2 | | | | | | | | | | | | | | | | | | | | | |
| hsa- | hsa- | 4.92 | 6.05 | 6.24 | 5.74 | 0.72 | 100 | 4.76 | 5.04 | 3.54 | 4.71 | 5.15 | 4.18 | 2.64 | 3.99 | 3.97 | 4.22 | 0.80 | 11 | 1.6E−02 | 1.52 | 2.9 |
| cand330 | cand330_st2 | | | | | | | | | | | | | | | | | | | | | |
| hsa-asg- | hsa-asg- | 7.03 | 7.50 | 7.03 | 7.19 | 0.27 | 100 | 5.62 | 6.45 | 4.84 | 5.67 | 6.64 | 6.23 | 4.90 | 5.46 | 5.25 | 5.67 | 0.65 | 11 | 3.2E−03 | 1.52 | 2.9 |
| 1187 | 1187_st2 | | | | | | | | | | | | | | | | | | | | | |
| hsa-asg- | hsa-asg- | 9.33 | 9.85 | 9.61 | 9.60 | 0.26 | 100 | 8.74 | 9.13 | 7.31 | 8.06 | 8.63 | 8.92 | 7.19 | 7.82 | 6.91 | 8.08 | 0.82 | 100 | 1.1E−02 | 1.52 | 2.9 |
| 12581 | 12581_st1 | | | | | | | | | | | | | | | | | | | | | |
| hsa-asg- | hsa-asg- | 5.58 | 5.51 | 4.75 | 5.28 | 0.46 | 67 | 3.85 | 4.55 | 4.02 | 3.15 | 3.39 | 4.03 | 4.07 | 2.62 | 4.24 | 3.77 | 0.60 | 0 | 2.8E−03 | 1.52 | 2.9 |
| 12760 | 12760_st2 | | | | | | | | | | | | | | | | | | | | | |
| hsa-asg- | hsa-asg- | 10.7 | 11.1 | 10.8 | 10.93 | 0.23 | 100 | 9.76 | 10.2 | 7.85 | 9.77 | 10.6 | 10.1 | 9.03 | 9.31 | 8.10 | 9.42 | 0.95 | 78 | 2.3E−02 | 1.51 | 2.9 |
| 1192 | 1192_st1 | | | | | | | | | | | | | | | | | | | | | |
| hsa-asg- | hsa-asg- | 10.0 | 10.6 | 10.2 | 10.29 | 0.30 | 100 | 9.15 | 9.42 | 8.00 | 9.05 | 9.49 | 9.21 | 8.45 | 8.37 | 7.83 | 8.77 | 0.62 | 56 | 2.6E−03 | 1.51 | 2.9 |
| 6063 | 6063_st2 | | | | | | | | | | | | | | | | | | | | | |
| hsa-asg- | hsa-asg- | 5.69 | 6.29 | 6.75 | 6.24 | 0.53 | 33 | 4.99 | 4.97 | 4.72 | 4.81 | 5.48 | 5.03 | 4.73 | 3.49 | 4.36 | 4.73 | 0.55 | 0 | 2.0E−03 | 1.51 | 2.9 |
| 8893 | 8893_st1 | | | | | | | | | | | | | | | | | | | | | |
| hsa-asg- | hsa-asg- | 7.01 | 7.46 | 6.86 | 7.11 | 0.31 | 100 | 5.78 | 6.11 | 5.39 | 5.87 | 5.63 | 6.05 | 4.90 | 5.68 | 4.97 | 5.60 | 0.43 | 0 | 2.6E−04 | 1.51 | 2.8 |
| 1922 | 1922_st2 | | | | | | | | | | | | | | | | | | | | | |
| hsa-asg- | hsa-asg- | 7.08 | 7.01 | 6.63 | 6.90 | 0.24 | 100 | 5.48 | 5.99 | 4.50 | 5.32 | 5.74 | 6.11 | 4.94 | 5.20 | 5.25 | 5.39 | 0.51 | 22 | 6.6E−04 | 1.51 | 2.8 |
| 6618 | 6618_st2 | | | | | | | | | | | | | | | | | | | | | |
| hsa-asg- | hsa-asg- | 9.24 | 9.94 | 9.49 | 9.56 | 0.36 | 100 | 7.90 | 9.00 | 7.67 | 7.40 | 8.36 | 9.04 | 7.28 | 8.07 | 7.72 | 8.05 | 0.64 | 100 | 3.3E−03 | 1.51 | 2.8 |
| 9261 | 9261_st1 | | | | | | | | | | | | | | | | | | | | | |
| hsa-asg- | hsa-asg- | 5.90 | 5.89 | 5.84 | 5.88 | 0.03 | 100 | 3.66 | 5.12 | 3.91 | 4.49 | 4.39 | 5.34 | 3.17 | 3.74 | 5.53 | 4.37 | 0.82 | 0 | 1.1E−02 | 1.51 | 2.8 |
| 2702 | 2702_st1 | | | | | | | | | | | | | | | | | | | | | |
| hsa- | hsa- | 7.15 | 7.45 | 7.19 | 7.26 | 0.16 | 100 | 5.70 | 7.04 | 5.12 | 5.14 | 5.80 | 6.71 | 3.77 | 5.92 | 6.65 | 5.76 | 1.01 | 33 | 3.2E−02 | 1.50 | 2.8 |
| cand523 | cand523_st1 | | | | | | | | | | | | | | | | | | | | | |
| hsa-asg- | hsa-asg- | 10.2 | 10.3 | 10.0 | 10.21 | 0.13 | 100 | 8.73 | 9.85 | 8.29 | 8.24 | 9.08 | 9.83 | 7.44 | 8.24 | 8.70 | 8.71 | 0.78 | 100 | 9.4E−03 | 1.50 | 2.8 |
| 8576 | 8576_st2 | | | | | | | | | | | | | | | | | | | | | |
| hsa-asg- | hsa-asg- | 9.56 | 9.88 | 9.46 | 9.63 | 0.22 | 100 | 8.47 | 8.99 | 6.70 | 8.24 | 9.27 | 9.00 | 7.37 | 7.92 | 7.23 | 8.13 | 0.90 | 100 | 1.9E−02 | 1.50 | 2.8 |
| 5085 | 5085_st2 | | | | | | | | | | | | | | | | | | | | | |
| hsa-asg- | hsa-asg- | 9.46 | 9.52 | 9.08 | 9.35 | 0.24 | 100 | 7.96 | 8.81 | 7.19 | 7.44 | 8.12 | 8.38 | 6.77 | 7.99 | 7.99 | 7.85 | 0.62 | 100 | 2.6E−03 | 1.50 | 2.8 |
| 12150 | 12150_st1 | | | | | | | | | | | | | | | | | | | | | |
| hsa-asg- | hsa-asg- | 8.52 | 8.73 | 8.27 | 8.51 | 0.23 | 100 | 6.10 | 7.96 | 6.68 | 6.57 | 7.18 | 8.18 | 5.82 | 7.05 | 7.49 | 7.01 | 0.80 | 100 | 1.0E−02 | 1.50 | 2.8 |
| 3637 | 3637_st1 | | | | | | | | | | | | | | | | | | | | | |
| hsa-asg- | hsa-asg- | 4.92 | 5.72 | 4.90 | 5.18 | 0.47 | 33 | 3.45 | 4.61 | 2.66 | 4.26 | 3.68 | 4.43 | 3.40 | 3.20 | 3.39 | 3.67 | 0.64 | 0 | 4.1E−03 | 1.50 | 2.8 |
| 12814 | 12814_st2 | | | | | | | | | | | | | | | | | | | | | |
| hsa-asg- | hsa-asg- | 10.1 | 10.6 | 10.3 | 10.37 | 0.24 | 100 | 9.33 | 9.66 | 7.84 | 8.80 | 9.87 | 9.43 | 8.59 | 8.78 | 7.59 | 8.88 | 0.79 | 56 | 1.0E−02 | 1.50 | 2.8 |
| 1860 | 1860_st1 | | | | | | | | | | | | | | | | | | | | | |
| hsa- | hsa- | 6.77 | 7.43 | 6.65 | 6.95 | 0.42 | 100 | 5.80 | 6.33 | 3.14 | 5.08 | 5.82 | 6.32 | 4.86 | 5.78 | 5.96 | 5.45 | 1.00 | 0 | 3.3E−02 | 1.50 | 2.8 |
| cand197 | cand197_st2 | | | | | | | | | | | | | | | | | | | | | |
| hsa-asg- | hsa-asg- | 9.86 | 10.0 | 9.91 | 9.95 | 0.11 | 100 | 8.57 | 9.40 | 7.66 | 8.51 | 9.18 | 8.83 | 7.73 | 8.35 | 7.85 | 8.45 | 0.62 | 100 | 2.5E−03 | 1.50 | 2.8 |
| 8254 | 8254_st2 | | | | | | | | | | | | | | | | | | | | | |
| hsa-asg- | hsa-asg- | 5.83 | 6.77 | 6.74 | 6.45 | 0.54 | 100 | 4.71 | 6.53 | 3.91 | 4.12 | 4.87 | 6.49 | 4.27 | 4.41 | 5.27 | 4.95 | 0.97 | 22 | 3.2E−02 | 1.49 | 2.8 |
| 8069 | 8069_st1 | | | | | | | | | | | | | | | | | | | | | |
| hsa-asg- | hsa-asg- | 10.9 | 11.0 | 10.7 | 10.92 | 0.14 | 100 | 10.1 | 10.3 | 8.52 | 9.31 | 10.1 | 10.1 | 8.67 | 9.49 | 8.16 | 9.43 | 0.82 | 100 | 1.2E−02 | 1.49 | 2.8 |
| 2906 | 2906_st2 | | | | | | | | | | | | | | | | | | | | | |
| hsa-asg- | hsa-asg- | 7.24 | 6.82 | 6.80 | 6.95 | 0.25 | 100 | 5.11 | 6.50 | 5.45 | 4.93 | 6.02 | 5.78 | 4.78 | 5.77 | 4.84 | 5.46 | 0.60 | 22 | 2.1E−03 | 1.49 | 2.8 |
| 11795 | 11795_st2 | | | | | | | | | | | | | | | | | | | | | |
| hsa-asg- | hsa-asg- | 8.20 | 8.29 | 8.07 | 8.19 | 0.11 | 100 | 6.97 | 7.32 | 6.17 | 6.81 | 7.15 | 7.07 | 5.90 | 6.37 | 6.51 | 6.70 | 0.48 | 100 | 4.3E−04 | 1.49 | 2.8 |
| 9511 | 9511_st2 | | | | | | | | | | | | | | | | | | | | | |
| hsa-asg- | hsa-asg- | 7.42 | 8.08 | 8.04 | 7.85 | 0.37 | 100 | 7.02 | 7.47 | 5.12 | 6.58 | 6.78 | 7.09 | 5.54 | 6.42 | 5.20 | 6.36 | 0.87 | 67 | 1.8E−02 | 1.49 | 2.8 |
| 8763 | 8763_st2 | | | | | | | | | | | | | | | | | | | | | |
| hsa-asg- | hsa-asg- | 10.5 | 10.8 | 10.5 | 10.65 | 0.18 | 100 | 9.42 | 10.0 | 8.35 | 9.28 | 9.83 | 9.77 | 8.51 | 8.97 | 8.25 | 9.16 | 0.67 | 78 | 4.2E−03 | 1.49 | 2.8 |
| 9507 | 9507_st1 | | | | | | | | | | | | | | | | | | | | | |
| hsa-asg- | hsa-asg- | 7.89 | 8.93 | 8.12 | 8.31 | 0.55 | 100 | 6.80 | 7.36 | 5.41 | 6.90 | 7.59 | 7.33 | 6.38 | 6.67 | 6.99 | 6.82 | 0.65 | 89 | 5.3E−03 | 1.49 | 2.8 |
| 8173 | 8173_st1 | | | | | | | | | | | | | | | | | | | | | |
| hsa-asg- | hsa-asg- | 9.05 | 9.27 | 9.05 | 9.12 | 0.13 | 100 | 7.55 | 8.54 | 6.66 | 7.48 | 8.11 | 8.46 | 6.85 | 7.40 | 7.63 | 7.63 | 0.65 | 100 | 3.3E−03 | 1.49 | 2.8 |
| 1893 | 1893_st2 | | | | | | | | | | | | | | | | | | | | | |
| hsa-asg- | hsa-asg- | 5.02 | 5.35 | 5.06 | 5.14 | 0.18 | 67 | 4.02 | 4.16 | 3.06 | 3.01 | 4.60 | 2.99 | 2.92 | 4.14 | 3.97 | 3.65 | 0.65 | 0 | 3.4E−03 | 1.49 | 2.8 |
| 12154 | 12154_st1 | | | | | | | | | | | | | | | | | | | | | |
| hsa-asg- | hsa-asg- | 4.16 | 5.86 | 5.65 | 5.22 | 0.93 | 67 | 4.49 | 4.37 | 2.66 | 3.82 | 4.21 | 4.55 | 3.93 | 3.74 | 1.86 | 3.74 | 0.91 | 0 | 3.4E−02 | 1.49 | 2.8 |
| 1203 | 1203_st1 | | | | | | | | | | | | | | | | | | | | | |
| hsa-asg- | hsa-asg- | 6.36 | 6.96 | 6.36 | 6.56 | 0.35 | 100 | 5.75 | 5.99 | 4.78 | 5.25 | 5.49 | 6.26 | 3.05 | 5.17 | 3.92 | 5.07 | 1.03 | 22 | 3.7E−02 | 1.49 | 2.8 |
| 14148 | 14148_st2 | | | | | | | | | | | | | | | | | | | | | |
| hsa-asg- | hsa-asg- | 6.57 | 8.00 | 8.02 | 7.53 | 0.83 | 100 | 6.46 | 6.64 | 5.06 | 6.14 | 7.07 | 6.29 | 5.43 | 6.54 | 4.81 | 6.05 | 0.77 | 67 | 1.7E−02 | 1.48 | 2.8 |
| 758 | 758_st1 | | | | | | | | | | | | | | | | | | | | | |
| hsa-asg- | hsa-asg- | 8.40 | 9.13 | 8.47 | 8.67 | 0.40 | 100 | 6.39 | 7.91 | 6.26 | 6.96 | 7.62 | 7.91 | 6.29 | 7.49 | 7.85 | 7.19 | 0.72 | 100 | 7.6E−03 | 1.48 | 2.8 |
| 9227 | 9227_st1 | | | | | | | | | | | | | | | | | | | | | |
| hsa-asg- | hsa-asg- | 10.5 | 11.0 | 10.8 | 10.79 | 0.22 | 100 | 9.54 | 10.1 | 8.39 | 9.37 | 10.2 | 10.0 | 8.80 | 9.21 | 8.12 | 9.31 | 0.75 | 100 | 8.4E−03 | 1.48 | 2.8 |
| 9273 | 9273_st2 | | | | | | | | | | | | | | | | | | | | | |
| hsa-asg- | hsa-asg- | 9.81 | 9.90 | 9.57 | 9.76 | 0.17 | 100 | 9.10 | 9.15 | 7.26 | 8.05 | 8.80 | 9.16 | 7.24 | 8.31 | 7.49 | 8.28 | 0.81 | 100 | 1.2E−02 | 1.48 | 2.8 |
| 9266 | 9266_st1 | | | | | | | | | | | | | | | | | | | | | |
| hsa-asg- | hsa-asg- | 5.79 | 5.70 | 5.77 | 5.75 | 0.05 | 100 | 4.99 | 5.33 | 3.06 | 3.46 | 4.95 | 5.17 | 4.00 | 3.64 | 3.87 | 4.27 | 0.84 | 0 | 1.4E−02 | 1.48 | 2.8 |
| 4315 | 4315_st2 | | | | | | | | | | | | | | | | | | | | | |
| hsa-miR- | hsa-miR- | 8.87 | 7.86 | 8.76 | 8.50 | 0.55 | 33 | 7.43 | 7.60 | 6.23 | 8.75 | 7.86 | 6.49 | 6.51 | 5.62 | 6.69 | 7.02 | 0.96 | 33 | 3.3E−02 | 1.48 | 2.8 |
| 497 | 497_st1 | | | | | | | | | | | | | | | | | | | | | |
| hsa-miR- | hsa- | 9.66 | 8.52 | 9.65 | 9.28 | 0.65 | 67 | 8.20 | 8.56 | 7.51 | 9.37 | 8.88 | 7.78 | 7.45 | 7.13 | 7.83 | 8.08 | 0.74 | 89 | 3.1E−02 | 1.20 | 2.3 |
| 497 | miR43_st1 | | | | | | | | | | | | | | | | | | | | | |
| hsa-asg- | hsa-asg- | 10.3 | 10.7 | 10.2 | 10.46 | 0.27 | 100 | 8.33 | 10.2 | 7.59 | 8.59 | 9.57 | 10.3 | 7.88 | 8.75 | 9.60 | 8.98 | 0.99 | 100 | 3.3E−02 | 1.48 | 2.8 |
| 542 | 542_st1 | | | | | | | | | | | | | | | | | | | | | |
| hsa-asg- | hsa-asg- | 7.68 | 8.11 | 7.63 | 7.81 | 0.27 | 100 | 6.55 | 7.46 | 5.35 | 6.56 | 7.00 | 7.20 | 5.09 | 6.21 | 5.58 | 6.33 | 0.84 | 67 | 1.5E−02 | 1.47 | 2.8 |
| 7169 | 7169_st1 | | | | | | | | | | | | | | | | | | | | | |
| hsa-asg- | hsa-asg- | 8.82 | 9.05 | 9.07 | 8.98 | 0.14 | 100 | 7.46 | 8.59 | 6.44 | 7.10 | 7.91 | 8.07 | 6.80 | 7.71 | 7.50 | 7.51 | 0.66 | 100 | 4.0E−03 | 1.47 | 2.8 |
| 5019 | 5019_st1 | | | | | | | | | | | | | | | | | | | | | |
| hsa-asg- | hsa-asg- | 8.07 | 8.22 | 7.72 | 8.00 | 0.26 | 100 | 7.11 | 7.19 | 6.67 | 5.45 | 6.65 | 6.93 | 5.66 | 6.72 | 6.41 | 6.53 | 0.61 | 78 | 2.5E−03 | 1.47 | 2.8 |
| 938 | 938_st2 | | | | | | | | | | | | | | | | | | | | | |
| hsa-asg- | hsa-asg- | 7.50 | 7.83 | 8.40 | 7.91 | 0.45 | 0 | 7.05 | 6.35 | 7.01 | 7.73 | 6.67 | 5.80 | 5.79 | 5.15 | 6.39 | 6.44 | 0.78 | 11 | 1.2E−02 | 1.47 | 2.8 |
| 14150 | 14150_st1 | | | | | | | | | | | | | | | | | | | | | |
| hsa-asg- | hsa-asg- | 8.25 | 8.48 | 8.32 | 8.35 | 0.12 | 100 | 6.71 | 7.85 | 5.72 | 7.17 | 7.23 | 7.65 | 6.11 | 6.71 | 6.80 | 6.88 | 0.68 | 89 | 4.9E−03 | 1.47 | 2.8 |
| 7224 | 7224_st2 | | | | | | | | | | | | | | | | | | | | | |
| hsa-asg- | hsa-asg- | 6.42 | 6.45 | 6.79 | 6.56 | 0.21 | 33 | 4.02 | 6.03 | 4.26 | 4.91 | 5.36 | 5.53 | 4.54 | 5.27 | 5.91 | 5.09 | 0.71 | 0 | 6.5E−03 | 1.46 | 2.8 |
| 4862 | 4862_st1 | | | | | | | | | | | | | | | | | | | | | |
| hsa-asg- | hsa-asg- | 10.7 | 11.1 | 10.7 | 10.90 | 0.25 | 100 | 9.42 | 10.2 | 8.19 | 9.24 | 10.3 | 10.1 | 8.71 | 9.04 | 9.72 | 9.44 | 0.73 | 89 | 7.9E−03 | 1.46 | 2.7 |
| 7859 | 7859_st1 | | | | | | | | | | | | | | | | | | | | | |
| hsa-asg- | hsa-asg- | 7.67 | 7.84 | 7.15 | 7.55 | 0.36 | 100 | 5.87 | 6.95 | 5.79 | 5.83 | 6.10 | 7.41 | 4.82 | 6.82 | 5.29 | 6.10 | 0.83 | 33 | 1.6E−02 | 1.46 | 2.7 |
| 6831 | 6831_st2 | | | | | | | | | | | | | | | | | | | | | |
| hsa-asg- | hsa-asg- | 8.15 | 8.29 | 8.09 | 8.18 | 0.10 | 100 | 6.97 | 7.58 | 5.71 | 6.54 | 7.03 | 7.69 | 5.90 | 6.59 | 6.46 | 6.72 | 0.68 | 89 | 4.7E−03 | 1.46 | 2.7 |
| 8957 | 8957_st2 | | | | | | | | | | | | | | | | | | | | | |
| hsa-asg- | hsa-asg- | 6.28 | 6.31 | 6.49 | 6.36 | 0.11 | 100 | 4.49 | 6.25 | 4.43 | 4.46 | 4.89 | 5.85 | 3.77 | 4.60 | 5.40 | 4.90 | 0.78 | 22 | 1.1E−02 | 1.46 | 2.7 |
| 11506 | 11506_st1 | | | | | | | | | | | | | | | | | | | | | |
| hsa-asg- | hsa-asg- | 9.52 | 9.96 | 9.78 | 9.75 | 0.22 | 100 | 8.67 | 9.06 | 7.06 | 8.30 | 8.97 | 9.04 | 7.83 | 8.10 | 7.68 | 8.30 | 0.70 | 11 | 6.2E−03 | 1.45 | 2.7 |
| 7764 | 7764_st2 | | | | | | | | | | | | | | | | | | | | | |
| hsa-asg- | hsa-asg- | 7.19 | 7.97 | 8.11 | 7.76 | 0.50 | 100 | 6.57 | 6.82 | 6.17 | 5.64 | 6.77 | 6.07 | 5.84 | 6.74 | 6.19 | 6.31 | 0.43 | 44 | 6.2E−04 | 1.45 | 2.7 |
| 3291 | 3291_st2 | | | | | | | | | | | | | | | | | | | | | |
| hsa-asg- | hsa-asg- | 6.95 | 7.49 | 7.15 | 7.20 | 0.27 | 100 | 5.57 | 7.08 | 4.43 | 5.45 | 6.33 | 6.59 | 4.33 | 5.68 | 6.28 | 5.75 | 0.94 | 44 | 2.8E−02 | 1.45 | 2.7 |
| 9483 | 9483_st1 | | | | | | | | | | | | | | | | | | | | | |
| hsa-asg- | hsa-asg- | 7.57 | 7.85 | 7.85 | 7.76 | 0.16 | 100 | 6.96 | 7.18 | 5.74 | 6.27 | 6.67 | 6.52 | 5.54 | 6.57 | 5.35 | 6.31 | 0.64 | 67 | 3.7E−03 | 1.45 | 2.7 |
| 5326 | 5326_st2 | | | | | | | | | | | | | | | | | | | | | |
| hsa-asg- | hsa-asg- | 7.42 | 8.09 | 7.61 | 7.71 | 0.35 | 100 | 6.52 | 7.11 | 5.35 | 6.04 | 6.33 | 6.91 | 5.43 | 6.44 | 6.24 | 6.26 | 0.59 | 78 | 2.9E−03 | 1.44 | 2.7 |
| 4814 | 4814_st1 | | | | | | | | | | | | | | | | | | | | | |
| hsa-asg- | hsa-asg- | 9.95 | 10.2 | 9.82 | 10.00 | 0.21 | 100 | 8.53 | 9.45 | 7.48 | 8.85 | 9.25 | 9.34 | 7.76 | 8.38 | 8.01 | 8.56 | 0.72 | 100 | 7.5E−03 | 1.44 | 2.7 |
| 6022 | 6022_st2 | | | | | | | | | | | | | | | | | | | | | |
| hsa-asg- | hsa-asg- | 9.96 | 10.3 | 9.95 | 10.07 | 0.20 | 100 | 8.51 | 9.49 | 7.47 | 8.51 | 9.06 | 9.76 | 7.67 | 8.84 | 8.43 | 8.64 | 0.76 | 100 | 1.0E−02 | 1.43 | 2.7 |
| 2199 | 2199_st1 | | | | | | | | | | | | | | | | | | | | | |
| hsa-asg- | hsa-asg- | 8.92 | 9.15 | 9.03 | 9.03 | 0.12 | 100 | 7.33 | 8.56 | 6.46 | 7.48 | 8.18 | 8.50 | 6.84 | 7.38 | 7.65 | 7.60 | 0.71 | 100 | 7.3E−03 | 1.43 | 2.7 |
| 7200 | 7200_st2 | | | | | | | | | | | | | | | | | | | | | |
| hsa-asg- | hsa-asg- | 6.60 | 5.74 | 6.15 | 6.16 | 0.43 | 100 | 3.66 | 6.34 | 4.54 | 4.93 | 4.36 | 6.07 | 3.77 | 4.73 | 4.16 | 4.73 | 0.93 | 22 | 3.1E−02 | 1.43 | 2.7 |
| 4458 | 4458_st1 | | | | | | | | | | | | | | | | | | | | | |
| hsa-asg- | hsa-asg- | 7.10 | 7.82 | 7.58 | 7.50 | 0.37 | 100 | 6.16 | 7.05 | 4.90 | 6.44 | 6.74 | 6.82 | 5.16 | 5.52 | 5.82 | 6.07 | 0.76 | 56 | 1.2E−02 | 1.43 | 2.7 |
| 8255 | 8255_st2 | | | | | | | | | | | | | | | | | | | | | |
| hsa-asg- | hsa-asg- | 5.37 | 3.91 | 3.00 | 4.09 | 1.19 | 33 | 2.05 | 2.54 | 3.67 | 2.51 | 1.46 | 2.85 | 2.64 | 2.45 | 3.77 | 2.66 | 0.72 | 0 | 2.8E−02 | 1.43 | 2.7 |
| 13908 | 13908_st2 | | | | | | | | | | | | | | | | | | | | | |
| hsa-asg- | hsa-asg- | 10.5 | 10.5 | 10.2 | 10.44 | 0.21 | 100 | 8.94 | 9.79 | 8.62 | 8.62 | 9.12 | 9.81 | 8.34 | 9.59 | 8.28 | 9.01 | 0.60 | 67 | 2.8E−03 | 1.43 | 2.7 |
| 814 | 814_st1 | | | | | | | | | | | | | | | | | | | | | |
| hsa-asg- | hsa-asg- | 2.38 | 4.31 | 5.20 | 3.96 | 1.44 | 33 | 2.78 | 2.36 | 1.92 | 3.52 | 3.39 | 2.35 | 2.32 | 1.88 | 2.33 | 2.54 | 0.58 | 0 | 2.7E−02 | 1.43 | 2.7 |
| 4037 | 4037_st1 | | | | | | | | | | | | | | | | | | | | | |
| hsa-asg- | hsa-asg- | 9.42 | 9.88 | 9.75 | 9.68 | 0.24 | 100 | 8.50 | 9.51 | 7.11 | 8.05 | 8.61 | 8.94 | 7.07 | 7.99 | 8.55 | 8.26 | 0.80 | 100 | 1.4E−02 | 1.43 | 2.7 |
| 8866 | 8866_st1 | | | | | | | | | | | | | | | | | | | | | |
| hsa-asg- | hsa-asg- | 9.03 | 9.62 | 9.11 | 9.25 | 0.32 | 100 | 7.74 | 8.73 | 6.83 | 7.65 | 8.46 | 8.47 | 6.96 | 7.78 | 7.82 | 7.83 | 0.65 | 100 | 5.3E−03 | 1.42 | 2.7 |
| 8623 | 8623_st1 | | | | | | | | | | | | | | | | | | | | | |
| hsa-asg- | hsa-asg- | 9.71 | 10.0 | 9.39 | 9.71 | 0.31 | 100 | 8.55 | 8.92 | 7.54 | 8.09 | 8.78 | 8.96 | 7.63 | 8.30 | 7.79 | 8.29 | 0.55 | 100 | 1.9E−03 | 1.42 | 2.7 |
| 12014 | 12014_st2 | | | | | | | | | | | | | | | | | | | | | |
| hsa-asg- | hsa-asg- | 5.56 | 6.33 | 6.28 | 6.06 | 0.43 | 100 | 4.76 | 4.76 | 4.39 | 5.12 | 5.35 | 5.40 | 4.38 | 4.07 | 3.53 | 4.64 | 0.61 | 11 | 4.4E−03 | 1.42 | 2.7 |
| 13471 | 13471_st1 | | | | | | | | | | | | | | | | | | | | | |
| hsa-asg- | hsa-asg- | 6.11 | 6.35 | 6.28 | 6.25 | 0.12 | 100 | 4.49 | 6.12 | 3.91 | 3.95 | 5.45 | 5.80 | 4.14 | 4.73 | 4.89 | 4.83 | 0.81 | 11 | 1.4E−02 | 1.42 | 2.7 |
| 2149 | 2149_st1 | | | | | | | | | | | | | | | | | | | | | |
| hsa-asg- | hsa-asg- | 5.95 | 6.16 | 6.40 | 6.17 | 0.22 | 100 | 4.31 | 6.18 | 5.09 | 4.19 | 4.93 | 4.95 | 3.40 | 4.41 | 5.31 | 4.75 | 0.79 | 11 | 1.3E−02 | 1.42 | 2.7 |
| 11930 | 11930_st1 | | | | | | | | | | | | | | | | | | | | | |
| hsa-asg- | hsa-asg- | 8.18 | 8.49 | 8.23 | 8.30 | 0.17 | 100 | 7.02 | 7.84 | 4.84 | 6.66 | 7.54 | 7.05 | 6.60 | 6.52 | 7.82 | 6.88 | 0.92 | 89 | 2.7E−02 | 1.42 | 2.7 |
| 11945 | 11945_st1 | | | | | | | | | | | | | | | | | | | | | |
| hsa-asg- | hsa-asg- | 8.14 | 8.13 | 7.98 | 8.08 | 0.09 | 100 | 5.65 | 7.77 | 5.80 | 6.18 | 6.92 | 7.17 | 5.56 | 7.08 | 7.86 | 6.67 | 0.89 | 78 | 2.3E−02 | 1.42 | 2.7 |
| 4002 | 4002_st1 | | | | | | | | | | | | | | | | | | | | | |
| hsa-asg- | hsa-asg- | 8.49 | 8.62 | 8.34 | 8.48 | 0.14 | 100 | 6.37 | 8.00 | 6.65 | 6.52 | 6.87 | 7.80 | 6.59 | 7.32 | 7.49 | 7.07 | 0.60 | 100 | 2.8E−03 | 1.42 | 2.7 |
| 9149 | 9149_st1 | | | | | | | | | | | | | | | | | | | | | |
| hsa-asg- | hsa-asg- | 6.53 | 6.66 | 6.05 | 6.41 | 0.32 | 67 | 5.14 | 6.07 | 4.26 | 4.79 | 4.89 | 5.52 | 3.50 | 5.13 | 5.71 | 5.00 | 0.78 | 11 | 1.3E−02 | 1.41 | 2.7 |
| 1727 | 1727_st2 | | | | | | | | | | | | | | | | | | | | | |
| hsa-asg- | hsa-asg- | 10.2 | 10.6 | 10.4 | 10.46 | 0.23 | 100 | 9.89 | 10.0 | 7.94 | 8.95 | 9.82 | 9.96 | 8.43 | 8.95 | 7.49 | 9.05 | 0.94 | 78 | 3.1E−02 | 1.41 | 2.7 |
| 6466 | 6466_st1 | | | | | | | | | | | | | | | | | | | | | |
| hsa-asg- | hsa-asg- | 7.00 | 6.80 | 6.76 | 6.85 | 0.13 | 100 | 6.16 | 5.85 | 4.72 | 5.27 | 6.19 | 6.09 | 4.69 | 5.37 | 4.63 | 5.44 | 0.66 | 0 | 4.9E−03 | 1.41 | 2.7 |
| 6675 | 6675_st1 | | | | | | | | | | | | | | | | | | | | | |
| hsa-asg- | hsa-asg- | 7.78 | 8.31 | 7.66 | 7.91 | 0.35 | 0 | 7.36 | 7.13 | 5.60 | 7.02 | 7.21 | 6.82 | 5.93 | 6.18 | 5.27 | 6.50 | 0.77 | 11 | 1.3E−02 | 1.41 | 2.7 |
| 5288 | 5288_st1 | | | | | | | | | | | | | | | | | | | | | |
| hsa-asg- | hsa-asg- | 9.56 | 10.4 | 10.3 | 10.13 | 0.50 | 100 | 9.25 | 9.25 | 7.42 | 8.69 | 9.25 | 9.08 | 8.33 | 8.71 | 8.53 | 8.72 | 0.60 | 100 | 4.3E−03 | 1.41 | 2.7 |
| 10638 | 10638_st2 | | | | | | | | | | | | | | | | | | | | | |
| hsa-asg- | hsa-asg- | 4.03 | 5.19 | 4.68 | 4.63 | 0.58 | 33 | 3.93 | 3.53 | 2.66 | 3.82 | 3.93 | 2.85 | 3.50 | 2.27 | 2.54 | 3.22 | 0.65 | 0 | 7.7E−03 | 1.41 | 2.7 |
| 4283 | 4283_st2 | | | | | | | | | | | | | | | | | | | | | |
| hsa-asg- | hsa-asg- | 6.25 | 6.39 | 6.46 | 6.37 | 0.11 | 33 | 5.25 | 5.68 | 4.26 | 5.34 | 5.61 | 5.07 | 4.44 | 4.38 | 4.63 | 4.96 | 0.55 | 0 | 1.5E−03 | 1.41 | 2.7 |
| 3587 | 3587_st1 | | | | | | | | | | | | | | | | | | | | | |
| hsa-miR- | hsa-miR- | 8.86 | 7.03 | 8.24 | 8.04 | 0.93 | 100 | 6.89 | 7.22 | 7.37 | 6.61 | 6.11 | 6.50 | 6.41 | 6.62 | 6.01 | 6.64 | 0.46 | 78 | 4.8E−03 | 1.41 | 2.6 |
| 503 | 503_st1 | | | | | | | | | | | | | | | | | | | | | |
| hsa-miR- | hsa- | 8.94 | 7.31 | 8.35 | 8.20 | 0.83 | 100 | 7.11 | 7.33 | 7.30 | 6.52 | 6.57 | 6.68 | 6.86 | 6.89 | 6.76 | 6.89 | 0.30 | 100 | 1.5E−03 | 1.31 | 2.5 |
| 503 | miR141_st1 | | | | | | | | | | | | | | | | | | | | | |
| hsa-asg- | hsa-asg- | 6.04 | 6.44 | 6.00 | 6.16 | 0.24 | 33 | 5.35 | 5.92 | 4.34 | 4.84 | 4.47 | 5.27 | 3.93 | 4.66 | 4.02 | 4.76 | 0.66 | 11 | 5.5E−03 | 1.41 | 2.6 |
| 8193 | 8193_st2 | | | | | | | | | | | | | | | | | | | | | |
| hsa-asg- | hsa-asg- | 9.76 | 10.0 | 9.66 | 9.81 | 0.17 | 100 | 8.49 | 9.10 | 7.26 | 8.32 | 9.07 | 8.97 | 7.92 | 8.54 | 7.94 | 8.40 | 0.62 | 100 | 3.5E−03 | 1.40 | 2.6 |
| 4020 | 4020_st2 | | | | | | | | | | | | | | | | | | | | | |
| hsa-asg- | hsa-asg- | 7.98 | 8.20 | 7.79 | 7.99 | 0.20 | 100 | 6.92 | 7.25 | 5.64 | 6.36 | 6.98 | 6.91 | 6.02 | 6.75 | 6.46 | 6.59 | 0.52 | 89 | 1.1E−03 | 1.40 | 2.6 |
| 7062 | 7062_st1 | | | | | | | | | | | | | | | | | | | | | |
| hsa-asg- | hsa-asg- | 6.83 | 7.02 | 6.44 | 6.76 | 0.29 | 100 | 5.57 | 6.26 | 3.96 | 5.69 | 5.53 | 6.20 | 3.85 | 5.49 | 5.68 | 5.36 | 0.87 | 0 | 2.3E−02 | 1.40 | 2.6 |
| 1157 | 1157_st1 | | | | | | | | | | | | | | | | | | | | | |
| hsa-asg- | hsa-asg- | 6.87 | 7.19 | 6.55 | 6.87 | 0.32 | 100 | 4.61 | 6.72 | 4.61 | 5.45 | 5.77 | 6.40 | 5.25 | 5.19 | 5.18 | 5.47 | 0.73 | 22 | 1.0E−02 | 1.40 | 2.6 |
| 12379 | 12379_st1 | | | | | | | | | | | | | | | | | | | | | |
| hsa-asg- | hsa-asg- | 9.53 | 10.0 | 9.52 | 9.69 | 0.28 | 100 | 8.08 | 8.80 | 7.14 | 8.05 | 8.52 | 9.22 | 7.87 | 8.73 | 8.19 | 8.29 | 0.61 | 100 | 3.7E−03 | 1.40 | 2.6 |
| 11249 | 11249_st2 | | | | | | | | | | | | | | | | | | | | | |
| hsa-asg- | hsa-asg- | 9.52 | 10.3 | 10.5 | 10.14 | 0.54 | 100 | 9.63 | 8.99 | 7.52 | 9.06 | 9.73 | 8.45 | 8.37 | 9.19 | 7.69 | 8.74 | 0.79 | 100 | 1.8E−02 | 1.40 | 2.6 |
| 5210 | 5210_st1 | | | | | | | | | | | | | | | | | | | | | |
| hsa-asg- | hsa-asg- | 11.9 | 12.0 | 11.8 | 11.94 | 0.08 | 100 | 10.9 | 11.3 | 9.81 | 10.5 | 11.2 | 11.0 | 9.78 | 10.2 | 9.91 | 10.54 | 0.63 | 100 | 3.9E−03 | 1.40 | 2.6 |
| 8552 | 8552_st2 | | | | | | | | | | | | | | | | | | | | | |
| hsa- | hsa- | 6.84 | 6.39 | 6.49 | 6.57 | 0.24 | 100 | 5.45 | 6.14 | 4.68 | 5.56 | 4.74 | 5.63 | 5.25 | 4.58 | 4.54 | 5.17 | 0.57 | 33 | 2.2E−03 | 1.40 | 2.6 |
| cand283 | cand283_st1 | | | | | | | | | | | | | | | | | | | | | |
| hsa-asg- | hsa-asg- | 6.67 | 6.97 | 6.48 | 6.71 | 0.25 | 100 | 4.94 | 6.29 | 4.98 | 5.02 | 5.03 | 6.19 | 4.82 | 4.96 | 5.60 | 5.31 | 0.57 | 22 | 2.4E−03 | 1.39 | 2.6 |
| 2696 | 2696_st1 | | | | | | | | | | | | | | | | | | | | | |
| hsa-asg- | hsa-asg- | 6.00 | 5.30 | 5.48 | 5.60 | 0.36 | 100 | 3.76 | 4.86 | 3.23 | 3.28 | 4.74 | 4.89 | 3.93 | 4.52 | 4.60 | 4.20 | 0.66 | 0 | 6.8E−03 | 1.39 | 2.6 |
| 3296 | 3296_st1 | | | | | | | | | | | | | | | | | | | | | |
| hsa-asg- | hsa-asg- | 7.40 | 7.38 | 7.26 | 7.35 | 0.07 | 100 | 5.65 | 6.71 | 5.39 | 5.64 | 5.61 | 6.60 | 5.05 | 6.34 | 6.59 | 5.95 | 0.61 | 44 | 3.3E−03 | 1.39 | 2.6 |
| 4971 | 4971_st1 | | | | | | | | | | | | | | | | | | | | | |
| hsa-asg- | hsa-asg- | 10.1 | 10.0 | 9.80 | 10.01 | 0.18 | 100 | 8.64 | 9.48 | 8.14 | 8.07 | 8.63 | 9.57 | 7.89 | 8.69 | 8.47 | 8.62 | 0.59 | 100 | 2.8E−03 | 1.39 | 2.6 |
| 11528 | 11528_st1 | | | | | | | | | | | | | | | | | | | | | |
| hsa- | hsa- | 6.24 | 6.96 | 6.69 | 6.63 | 0.36 | 100 | 5.68 | 5.76 | 5.30 | 5.17 | 5.43 | 5.49 | 4.73 | 4.85 | 4.76 | 5.24 | 0.39 | 11 | 2.9E−04 | 1.39 | 2.6 |
| miR165 | miR165_st1 | | | | | | | | | | | | | | | | | | | | | |
| hsa- | hsa- | 7.03 | 7.62 | 6.98 | 7.21 | 0.35 | 100 | 6.49 | 6.74 | 5.47 | 5.96 | 6.52 | 6.43 | 4.73 | 5.76 | 4.28 | 5.82 | 0.86 | 44 | 2.3E−02 | 1.39 | 2.6 |
| cand855 | cand855_st1 | | | | | | | | | | | | | | | | | | | | | |
| hsa-asg- | hsa-asg- | 7.11 | 8.00 | 7.96 | 7.69 | 0.50 | 100 | 6.52 | 6.97 | 5.47 | 6.19 | 6.98 | 6.96 | 5.92 | 5.85 | 5.82 | 6.30 | 0.58 | 67 | 4.1E−03 | 1.39 | 2.6 |
| 7388 | 7388_st1 | | | | | | | | | | | | | | | | | | | | | |
| hsa-asg- | hsa-asg- | 8.72 | 8.68 | 8.35 | 8.58 | 0.21 | 100 | 7.89 | 7.78 | 6.94 | 7.02 | 7.43 | 7.51 | 6.49 | 7.43 | 6.26 | 7.19 | 0.56 | 100 | 2.2E−03 | 1.39 | 2.6 |
| 6203 | 6203_st2 | | | | | | | | | | | | | | | | | | | | | |
| hsa- | hsa- | 5.23 | 5.59 | 5.28 | 5.37 | 0.19 | 0 | 3.56 | 5.61 | 2.86 | 3.46 | 4.21 | 4.60 | 3.29 | 3.64 | 4.60 | 3.98 | 0.85 | 11 | 2.1E−02 | 1.39 | 2.6 |
| cand703 | cand703_st2 | | | | | | | | | | | | | | | | | | | | | |
| hsa-asg- | hsa-asg- | 7.14 | 7.13 | 6.67 | 6.98 | 0.27 | 100 | 5.14 | 6.39 | 5.19 | 5.23 | 6.53 | 5.65 | 4.90 | 5.32 | 6.00 | 5.60 | 0.58 | 33 | 3.0E−03 | 1.39 | 2.6 |
| 10259 | 10259_st1 | | | | | | | | | | | | | | | | | | | | | |
| hsa-asg- | hsa-asg- | 6.57 | 6.48 | 6.29 | 6.45 | 0.14 | 100 | 4.85 | 6.30 | 3.73 | 4.79 | 5.12 | 6.09 | 3.85 | 5.37 | 5.44 | 5.06 | 0.88 | 22 | 2.5E−02 | 1.39 | 2.6 |
| 11895 | 11895_st1 | | | | | | | | | | | | | | | | | | | | | |
| hsa-asg- | hsa-asg- | 5.14 | 3.91 | 4.46 | 4.50 | 0.62 | 33 | 4.17 | 3.64 | 2.86 | 2.69 | 3.54 | 2.69 | 3.40 | 2.78 | 2.33 | 3.12 | 0.59 | 0 | 5.9E−03 | 1.38 | 2.6 |
| 11443 | 11443_st1 | | | | | | | | | | | | | | | | | | | | | |
| hsa-asg- | hsa-asg- | 10.0 | 10.5 | 10.3 | 10.32 | 0.24 | 100 | 8.91 | 9.87 | 8.07 | 8.69 | 9.41 | 9.19 | 8.34 | 9.08 | 8.85 | 8.94 | 0.54 | 78 | 1.9E−03 | 1.38 | 2.6 |
| 8639 | 8639_st2 | | | | | | | | | | | | | | | | | | | | | |
| hsa-asg- | hsa-asg- | 4.47 | 5.77 | 4.64 | 4.96 | 0.71 | 33 | 3.66 | 4.08 | 3.54 | 3.01 | 3.68 | 4.24 | 3.77 | 2.45 | 3.77 | 3.58 | 0.55 | 0 | 5.2E−03 | 1.38 | 2.6 |
| 1127 | 1127_st2 | | | | | | | | | | | | | | | | | | | | | |
| hsa- | hsa- | 6.22 | 6.62 | 6.11 | 6.32 | 0.27 | 33 | 4.94 | 5.99 | 4.50 | 5.23 | 5.03 | 5.69 | 4.00 | 4.18 | 4.87 | 4.94 | 0.65 | 0 | 6.0E−03 | 1.38 | 2.6 |
| miR166 | miR166_st1 | | | | | | | | | | | | | | | | | | | | | |
| hsa-miR- | hsa-miR- | 6.68 | 5.80 | 6.25 | 6.24 | 0.44 | 67 | 4.66 | 5.28 | 4.72 | 5.06 | 4.72 | 5.40 | 4.33 | 4.49 | 5.12 | 4.86 | 0.37 | 0 | 2.9E−04 | 1.38 | 2.6 |
| 370 | 370_st1 | | | | | | | | | | | | | | | | | | | | | |
| hsa-asg- | hsa-asg- | 6.00 | 5.85 | 5.63 | 5.83 | 0.19 | 100 | 4.76 | 4.95 | 3.54 | 3.95 | 4.00 | 5.27 | 3.93 | 4.07 | 5.60 | 4.45 | 0.71 | 0 | 9.1E−03 | 1.37 | 2.6 |
| 12094 | 12094_st1 | | | | | | | | | | | | | | | | | | | | | |
| hsa-asg- | hsa-asg- | 8.26 | 8.82 | 8.27 | 8.45 | 0.32 | 100 | 7.39 | 7.90 | 6.27 | 6.53 | 7.10 | 7.59 | 6.54 | 6.96 | 7.49 | 7.08 | 0.55 | 100 | 2.7E−03 | 1.36 | 2.6 |
| 5691 | 5691_st2 | | | | | | | | | | | | | | | | | | | | | |
| hsa-asg- | hsa-asg- | 8.53 | 8.80 | 8.60 | 8.64 | 0.14 | 100 | 6.86 | 8.23 | 6.29 | 6.39 | 7.75 | 8.21 | 6.43 | 7.56 | 7.79 | 7.28 | 0.79 | 100 | 1.6E−02 | 1.36 | 2.6 |
| 8922 | 8922_st2 | | | | | | | | | | | | | | | | | | | | | |
| hsa-asg- | hsa-asg- | 6.43 | 6.61 | 6.21 | 6.42 | 0.20 | 67 | 5.65 | 5.51 | 3.31 | 4.93 | 5.49 | 5.24 | 4.78 | 5.31 | 5.29 | 5.05 | 0.71 | 0 | 9.7E−03 | 1.36 | 2.6 |
| 13661 | 13661_st1 | | | | | | | | | | | | | | | | | | | | | |
| hsa-asg- | hsa-asg- | 6.30 | 6.79 | 6.30 | 6.46 | 0.28 | 100 | 5.29 | 6.01 | 3.73 | 5.42 | 5.80 | 6.00 | 4.33 | 5.13 | 4.20 | 5.10 | 0.83 | 22 | 2.2E−02 | 1.36 | 2.6 |
| 7222 | 7222_st2 | | | | | | | | | | | | | | | | | | | | | |
| hsa-asg- | hsa-asg- | 7.06 | 7.40 | 6.55 | 7.00 | 0.43 | 100 | 5.68 | 6.23 | 4.72 | 5.40 | 6.66 | 6.03 | 4.69 | 5.85 | 5.55 | 5.64 | 0.65 | 11 | 7.7E−03 | 1.36 | 2.6 |
| 9287 | 9287_st2 | | | | | | | | | | | | | | | | | | | | | |
| hsa-asg- | hsa-asg- | 6.23 | 5.81 | 6.24 | 6.09 | 0.25 | 100 | 5.92 | 4.49 | 5.04 | 6.08 | 5.09 | 4.87 | 4.14 | 2.93 | 4.07 | 4.73 | 0.97 | 22 | 4.2E−02 | 1.36 | 2.6 |
| 8411 | 8411_st2 | | | | | | | | | | | | | | | | | | | | | |
| hsa-asg- | hsa-asg- | 5.31 | 5.72 | 5.09 | 5.37 | 0.32 | 33 | 3.85 | 4.61 | 3.39 | 3.34 | 4.39 | 5.37 | 2.78 | 4.63 | 3.77 | 4.01 | 0.80 | 0 | 1.9E−02 | 1.36 | 2.6 |
| 2267 | 2267_st2 | | | | | | | | | | | | | | | | | | | | | |
| hsa-asg- | hsa-asg- | 6.92 | 7.10 | 6.90 | 6.97 | 0.11 | 100 | 5.96 | 6.71 | 5.04 | 5.71 | 6.48 | 6.04 | 4.73 | 5.22 | 4.67 | 5.62 | 0.74 | 33 | 1.2E−02 | 1.36 | 2.6 |
| 7579 | 7579_st2 | | | | | | | | | | | | | | | | | | | | | |
| hsa-asg- | hsa-asg- | 8.38 | 9.11 | 8.45 | 8.65 | 0.41 | 33 | 7.03 | 8.09 | 6.03 | 7.13 | 8.02 | 7.82 | 6.78 | 7.23 | 7.50 | 7.29 | 0.65 | 44 | 7.8E−03 | 1.35 | 2.6 |
| 747 | 747_st1 | | | | | | | | | | | | | | | | | | | | | |
| hsa-asg- | hsa-asg- | 6.33 | 6.41 | 6.73 | 6.49 | 0.21 | 33 | 5.29 | 6.11 | 4.26 | 4.66 | 5.30 | 5.69 | 4.73 | 5.13 | 5.07 | 5.14 | 0.56 | 0 | 2.5E−03 | 1.35 | 2.6 |
| 9615 | 9615_st1 | | | | | | | | | | | | | | | | | | | | | |
| hsa-asg- | hsa-asg- | 6.89 | 7.28 | 7.25 | 7.14 | 0.22 | 100 | 5.89 | 6.69 | 4.75 | 5.65 | 6.28 | 6.55 | 4.82 | 5.72 | 5.75 | 5.79 | 0.68 | 44 | 8.0E−03 | 1.35 | 2.6 |
| 4155 | 4155_st1 | | | | | | | | | | | | | | | | | | | | | |
| hsa-miR- | hsa-miR- | 6.23 | 6.69 | 6.88 | 6.60 | 0.33 | 100 | 4.85 | 6.42 | 4.68 | 5.73 | 5.61 | 6.08 | 3.40 | 4.41 | 6.12 | 5.25 | 0.99 | 22 | 4.7E−02 | 1.35 | 2.5 |
| 198 | 198_st1 | | | | | | | | | | | | | | | | | | | | | |
| hsa-asg- | hsa-asg- | 8.73 | 8.17 | 8.59 | 8.50 | 0.29 | 100 | 7.64 | 7.18 | 7.34 | 8.22 | 8.03 | 6.58 | 6.97 | 5.74 | 6.63 | 7.15 | 0.78 | 89 | 1.6E−02 | 1.35 | 2.5 |
| 10883 | 10883_st1 | | | | | | | | | | | | | | | | | | | | | |
| hsa-asg- | hsa-asg- | 6.70 | 7.04 | 6.44 | 6.73 | 0.30 | 100 | 5.14 | 5.92 | 5.39 | 4.60 | 4.99 | 5.74 | 4.54 | 5.76 | 6.36 | 5.38 | 0.62 | 0 | 5.1E−03 | 1.35 | 2.5 |
| 14217 | 14217_st1 | | | | | | | | | | | | | | | | | | | | | |
| hsa-asg- | hsa-asg- | 5.58 | 5.53 | 5.26 | 5.46 | 0.17 | 33 | 4.71 | 4.81 | 3.79 | 3.34 | 4.99 | 5.05 | 2.32 | 3.83 | 4.16 | 4.11 | 0.90 | 0 | 3.2E−02 | 1.35 | 2.5 |
| 6631 | 6631_st1 | | | | | | | | | | | | | | | | | | | | | |
| hsa-asg- | hsa-asg- | 5.99 | 6.86 | 6.18 | 6.34 | 0.46 | 100 | 5.68 | 4.95 | 4.81 | 5.30 | 5.33 | 5.13 | 5.12 | 4.78 | 3.87 | 5.00 | 0.51 | 11 | 2.3E−03 | 1.34 | 2.5 |
| 1399 | 1399_st1 | | | | | | | | | | | | | | | | | | | | | |
| hsa-asg- | hsa-asg- | 8.15 | 8.47 | 8.41 | 8.34 | 0.17 | 100 | 7.34 | 7.49 | 5.55 | 6.66 | 7.58 | 7.52 | 6.53 | 7.84 | 6.49 | 7.00 | 0.74 | 89 | 1.2E−02 | 1.34 | 2.5 |
| 9132 | 9132_st2 | | | | | | | | | | | | | | | | | | | | | |
| hsa-asg- | hsa-asg- | 8.96 | 9.32 | 9.29 | 9.19 | 0.20 | 100 | 7.91 | 8.53 | 7.12 | 7.77 | 8.30 | 8.52 | 7.07 | 7.90 | 7.49 | 7.85 | 0.55 | 100 | 2.3E−03 | 1.34 | 2.5 |
| 4027 | 4027_st2 | | | | | | | | | | | | | | | | | | | | | |
| hsa-asg- | hsa-asg- | 7.85 | 7.75 | 7.82 | 7.81 | 0.05 | 100 | 6.71 | 7.09 | 5.14 | 6.71 | 7.27 | 7.19 | 6.33 | 6.32 | 5.42 | 6.47 | 0.75 | 78 | 1.3E−02 | 1.34 | 2.5 |
| 508 | 508_st2 | | | | | | | | | | | | | | | | | | | | | |
| hsa-asg- | hsa-asg- | 7.69 | 7.40 | 7.24 | 7.45 | 0.23 | 100 | 5.85 | 7.33 | 4.90 | 6.19 | 5.87 | 6.98 | 5.29 | 6.15 | 6.38 | 6.10 | 0.76 | 56 | 1.5E−02 | 1.34 | 2.5 |
| 8999 | 8999_st1 | | | | | | | | | | | | | | | | | | | | | |
| hsa-asg- | hsa-asg- | 6.12 | 6.90 | 6.83 | 6.62 | 0.43 | 67 | 6.39 | 5.28 | 4.17 | 5.28 | 5.85 | 5.09 | 5.16 | 5.58 | 4.70 | 5.28 | 0.64 | 11 | 7.5E−03 | 1.34 | 2.5 |
| 7578 | 7578_st2 | | | | | | | | | | | | | | | | | | | | | |
| hsa-asg-95 | hsa-asg- | 7.86 | 8.21 | 7.75 | 7.94 | 0.24 | 100 | 6.39 | 7.48 | 5.72 | 6.48 | 6.48 | 7.23 | 6.16 | 6.58 | 6.87 | 6.60 | 0.53 | 89 | 2.1E−03 | 1.34 | 2.5 |
| | 95_st2 | | | | | | | | | | | | | | | | | | | | | |
| hsa-asg- | hsa-asg- | 6.19 | 6.59 | 6.52 | 6.43 | 0.21 | 100 | 4.17 | 6.62 | 3.91 | 4.95 | 5.07 | 6.11 | 4.33 | 4.96 | 5.72 | 5.09 | 0.91 | 22 | 3.4E−02 | 1.34 | 2.5 |
| 7439 | 7439_st1 | | | | | | | | | | | | | | | | | | | | | |
| hsa-asg- | hsa-asg- | 7.95 | 8.44 | 8.37 | 8.25 | 0.27 | 100 | 6.42 | 7.87 | 6.44 | 6.54 | 7.36 | 7.78 | 6.16 | 6.58 | 7.10 | 6.92 | 0.63 | 100 | 6.0E−03 | 1.34 | 2.5 |
| 11619 | 11619_st1 | | | | | | | | | | | | | | | | | | | | | |
| hsa-asg- | hsa-asg- | 8.40 | 9.00 | 8.50 | 8.63 | 0.32 | 100 | 6.97 | 8.48 | 5.97 | 7.02 | 7.70 | 8.05 | 6.58 | 7.35 | 7.57 | 7.30 | 0.76 | 89 | 1.6E−02 | 1.33 | 2.5 |
| 10414 | 10414_st1 | | | | | | | | | | | | | | | | | | | | | |
| hsa-asg- | hsa-asg- | 10.8 | 10.7 | 10.4 | 10.70 | 0.18 | 100 | 10.1 | 10.1 | 8.97 | 9.23 | 9.89 | 9.97 | 8.64 | 9.33 | 7.88 | 9.36 | 0.78 | 89 | 1.7E−02 | 1.33 | 2.5 |
| 9092 | 9092_st2 | | | | | | | | | | | | | | | | | | | | | |
| hsa-asg- | hsa-asg- | 9.06 | 9.42 | 8.93 | 9.14 | 0.25 | 100 | 8.09 | 8.51 | 6.68 | 7.80 | 8.73 | 8.79 | 7.24 | 7.54 | 6.83 | 7.80 | 0.79 | 100 | 1.9E−02 | 1.33 | 2.5 |
| 777 | 777_st1 | | | | | | | | | | | | | | | | | | | | | |
| hsa-asg- | hsa-asg- | 8.30 | 8.52 | 8.52 | 8.45 | 0.12 | 100 | 6.79 | 8.29 | 6.40 | 6.69 | 7.40 | 7.74 | 6.63 | 6.74 | 7.36 | 7.11 | 0.62 | 100 | 5.0E−03 | 1.33 | 2.5 |
| 12406 | 12406_st1 | | | | | | | | | | | | | | | | | | | | | |
| hsa-asg- | hsa-asg- | 8.09 | 8.70 | 8.74 | 8.51 | 0.37 | 100 | 7.22 | 7.75 | 5.94 | 7.29 | 7.77 | 7.85 | 6.57 | 7.31 | 6.91 | 7.18 | 0.63 | 89 | 6.5E−03 | 1.33 | 2.5 |
| 1919 | 1919_st1 | | | | | | | | | | | | | | | | | | | | | |
| hsa-asg- | hsa-asg- | 8.66 | 9.01 | 8.83 | 8.83 | 0.18 | 33 | 8.14 | 8.40 | 6.47 | 7.60 | 8.06 | 8.11 | 6.61 | 7.14 | 6.99 | 7.50 | 0.72 | 56 | 1.1E−02 | 1.33 | 2.5 |
| 11155 | 11155_st1 | | | | | | | | | | | | | | | | | | | | | |
| hsa-asg- | hsa-asg- | 8.99 | 9.21 | 8.77 | 8.99 | 0.22 | 100 | 7.52 | 8.66 | 7.20 | 7.14 | 7.79 | 8.70 | 7.12 | 7.77 | 7.02 | 7.66 | 0.64 | 100 | 6.5E−03 | 1.33 | 2.5 |
| 12946 | 12946_st1 | | | | | | | | | | | | | | | | | | | | | |
| hsa-asg- | hsa-asg- | 9.07 | 9.59 | 9.33 | 9.33 | 0.26 | 100 | 7.80 | 8.87 | 6.56 | 7.65 | 8.92 | 8.91 | 7.48 | 7.87 | 7.92 | 8.00 | 0.79 | 100 | 1.9E−02 | 1.33 | 2.5 |
| 12001 | 12001_st1 | | | | | | | | | | | | | | | | | | | | | |
| hsa-asg- | hsa-asg- | 6.72 | 6.68 | 6.62 | 6.68 | 0.05 | 100 | 5.32 | 6.14 | 4.81 | 5.78 | 5.15 | 5.76 | 4.73 | 5.42 | 5.00 | 5.35 | 0.48 | 11 | 9.0E−04 | 1.33 | 2.5 |
| 7215 | 7215_st2 | | | | | | | | | | | | | | | | | | | | | |
| hsa-asg- | hsa-asg- | 5.62 | 6.42 | 5.96 | 6.00 | 0.40 | 100 | 4.99 | 5.37 | 4.02 | 4.33 | 5.53 | 5.60 | 4.07 | 4.52 | 3.65 | 4.67 | 0.72 | 0 | 1.3E−02 | 1.33 | 2.5 |
| 1172 | 1172_st2 | | | | | | | | | | | | | | | | | | | | | |
| hsa-asg- | hsa-asg- | 10.7 | 10.7 | 10.6 | 10.69 | 0.09 | 100 | 9.99 | 10.1 | 8.07 | 9.48 | 10.2 | 10.1 | 8.72 | 9.38 | 8.14 | 9.36 | 0.86 | 89 | 2.7E−02 | 1.33 | 2.5 |
| 12136 | 12136_st2 | | | | | | | | | | | | | | | | | | | | | |
| hsa-asg- | hsa-asg- | 8.07 | 8.25 | 7.86 | 8.06 | 0.19 | 0 | 6.73 | 8.24 | 6.39 | 6.13 | 6.86 | 7.69 | 5.58 | 6.99 | 6.02 | 6.74 | 0.84 | 11 | 2.4E−02 | 1.33 | 2.5 |
| 4026 | 4026_st1 | | | | | | | | | | | | | | | | | | | | | |
| hsa-asg- | hsa-asg- | 5.62 | 6.15 | 5.67 | 5.82 | 0.29 | 100 | 4.24 | 4.66 | 5.09 | 4.81 | 4.14 | 4.84 | 3.77 | 4.63 | 4.24 | 4.49 | 0.42 | 0 | 5.3E−04 | 1.32 | 2.5 |
| 8682 | 8682_st2 | | | | | | | | | | | | | | | | | | | | | |
| hsa-asg- | hsa-asg- | 10.1 | 10.4 | 10.1 | 10.26 | 0.20 | 100 | 9.13 | 9.56 | 9.24 | 8.61 | 8.88 | 9.05 | 8.30 | 9.01 | 8.70 | 8.94 | 0.37 | 100 | 1.8E−04 | 1.32 | 2.5 |
| 3722 | 3722_st1 | | | | | | | | | | | | | | | | | | | | | |
| hsa-asg- | hsa-asg- | 9.29 | 9.50 | 9.40 | 9.40 | 0.10 | 100 | 8.45 | 8.97 | 6.52 | 8.09 | 8.61 | 8.95 | 7.37 | 8.26 | 7.55 | 8.08 | 0.81 | 100 | 2.1E−02 | 1.32 | 2.5 |
| 7653 | 7653_st1 | | | | | | | | | | | | | | | | | | | | | |
| hsa-asg- | hsa-asg- | 7.27 | 7.77 | 7.12 | 7.39 | 0.34 | 100 | 6.06 | 7.05 | 5.39 | 5.68 | 6.20 | 6.89 | 5.16 | 6.81 | 5.40 | 6.07 | 0.72 | 56 | 1.3E−02 | 1.31 | 2.5 |
| 5289 | 5289_st2 | | | | | | | | | | | | | | | | | | | | | |
| hsa-asg- | hsa-asg- | 4.42 | 5.63 | 5.91 | 5.32 | 0.79 | 33 | 4.02 | 4.30 | 3.06 | 4.12 | 4.60 | 4.37 | 3.68 | 4.14 | 3.77 | 4.01 | 0.46 | 0 | 4.5E−03 | 1.31 | 2.5 |
| 12515 | 12515_st2 | | | | | | | | | | | | | | | | | | | | | |
| hsa-asg- | hsa-asg- | 8.17 | 8.30 | 7.81 | 8.09 | 0.25 | 100 | 6.92 | 7.64 | 6.17 | 6.39 | 6.66 | 7.78 | 5.75 | 7.30 | 6.41 | 6.78 | 0.69 | 100 | 1.0E−02 | 1.31 | 2.5 |
| 12775 | 12775_st1 | | | | | | | | | | | | | | | | | | | | | |
| hsa-asg- | hsa-asg- | 7.66 | 7.77 | 7.85 | 7.76 | 0.10 | 100 | 6.25 | 7.11 | 5.24 | 6.42 | 7.23 | 7.22 | 5.46 | 6.60 | 6.51 | 6.45 | 0.72 | 78 | 1.2E−02 | 1.31 | 2.5 |
| 8257 | 8257_st1 | | | | | | | | | | | | | | | | | | | | | |
| hsa-asg- | hsa-asg- | 7.50 | 8.33 | 7.25 | 7.69 | 0.57 | 100 | 6.98 | 7.38 | 5.91 | 6.12 | 7.07 | 7.18 | 5.73 | 6.04 | 5.07 | 6.39 | 0.79 | 78 | 2.6E−02 | 1.31 | 2.5 |
| 9343 | 9343_st1 | | | | | | | | | | | | | | | | | | | | | |
| hsa-asg- | hsa-asg- | 6.01 | 6.66 | 6.38 | 6.35 | 0.33 | 67 | 5.22 | 5.78 | 4.34 | 4.93 | 5.32 | 5.60 | 4.00 | 4.76 | 5.44 | 5.04 | 0.59 | 11 | 5.0E−03 | 1.31 | 2.5 |
| 7278 | 7278_st1 | | | | | | | | | | | | | | | | | | | | | |
| hsa-asg- | hsa-asg- | 6.03 | 6.17 | 6.10 | 6.10 | 0.07 | 0 | 5.07 | 5.81 | 3.60 | 4.93 | 4.24 | 5.46 | 4.33 | 4.03 | 5.64 | 4.79 | 0.77 | 11 | 1.8E−02 | 1.31 | 2.5 |
| 7048 | 7048_st1 | | | | | | | | | | | | | | | | | | | | | |
| hsa-asg- | hsa-asg- | 8.67 | 9.44 | 8.90 | 9.00 | 0.39 | 100 | 7.30 | 8.65 | 6.70 | 7.47 | 8.17 | 8.59 | 7.08 | 7.39 | 7.95 | 7.70 | 0.68 | 100 | 1.1E−02 | 1.30 | 2.5 |
| 12297 | 12297_st2 | | | | | | | | | | | | | | | | | | | | | |
| hsa-asg- | hsa-asg- | 9.05 | 9.54 | 9.52 | 9.37 | 0.27 | 100 | 8.18 | 9.05 | 6.89 | 7.97 | 8.57 | 8.41 | 7.62 | 8.36 | 7.56 | 8.07 | 0.64 | 100 | 7.6E−03 | 1.30 | 2.5 |
| 9185 | 9185_st2 | | | | | | | | | | | | | | | | | | | | | |
| hsa-asg- | hsa-asg- | 7.13 | 7.77 | 7.27 | 7.39 | 0.34 | 100 | 5.87 | 6.96 | 5.26 | 5.94 | 6.13 | 6.89 | 5.12 | 6.10 | 6.52 | 6.09 | 0.64 | 44 | 8.0E−03 | 1.30 | 2.5 |
| 6792 | 6792_st1 | | | | | | | | | | | | | | | | | | | | | |
| hsa-asg- | hsa-asg- | 9.89 | 10.1 | 9.82 | 9.94 | 0.15 | 100 | 8.67 | 9.47 | 7.47 | 8.39 | 8.77 | 9.28 | 7.92 | 8.72 | 9.05 | 8.64 | 0.64 | 44 | 6.7E−03 | 1.30 | 2.5 |
| 3952 | 3952_st1 | | | | | | | | | | | | | | | | | | | | | |
| hsa-asg- | hsa-asg- | 8.46 | 8.50 | 8.25 | 8.41 | 0.13 | 100 | 6.37 | 7.98 | 5.82 | 6.66 | 7.06 | 8.09 | 6.59 | 7.29 | 8.09 | 7.10 | 0.82 | 89 | 2.4E−02 | 1.30 | 2.5 |
| 3584 | 3584_st2 | | | | | | | | | | | | | | | | | | | | | |
| hsa-asg- | hsa-asg- | 7.11 | 7.43 | 6.69 | 7.08 | 0.37 | 100 | 4.90 | 6.96 | 5.51 | 5.47 | 5.75 | 6.74 | 4.69 | 5.87 | 6.13 | 5.78 | 0.76 | 22 | 1.8E−02 | 1.30 | 2.5 |
| 4523 | 4523_st2 | | | | | | | | | | | | | | | | | | | | | |
| hsa-asg- | hsa-asg- | 8.59 | 8.73 | 8.14 | 8.49 | 0.31 | 100 | 7.07 | 7.80 | 6.07 | 6.85 | 7.25 | 8.08 | 7.31 | 7.31 | 6.95 | 7.19 | 0.57 | 89 | 4.3E−03 | 1.30 | 2.5 |
| 1775 | 1775_st2 | | | | | | | | | | | | | | | | | | | | | |
| hsa-miR- | hsa-miR- | 10.2 | 10.8 | 11.2 | 10.77 | 0.48 | 100 | 9.78 | 9.28 | 9.20 | 9.98 | 9.13 | 9.06 | 9.64 | 9.52 | 9.66 | 9.47 | 0.32 | 100 | 2.8E−04 | 1.29 | 2.5 |
| 652 | 652_st1 | | | | | | | | | | | | | | | | | | | | | |
| hsa-asg- | hsa-asg- | 8.71 | 6.84 | 7.76 | 7.77 | 0.94 | 100 | 7.43 | 6.36 | 6.67 | 7.04 | 6.26 | 6.27 | 6.63 | 6.55 | 5.09 | 6.48 | 0.64 | 89 | 2.1E−02 | 1.29 | 2.5 |
| 9696 | 9696_st1 | | | | | | | | | | | | | | | | | | | | | |
| hsa-asg- | hsa-asg- | 11.0 | 11.2 | 11.1 | 11.13 | 0.09 | 100 | 10.1 | 10.6 | 8.73 | 9.77 | 10.4 | 10.7 | 9.17 | 9.97 | 8.89 | 9.84 | 0.75 | 100 | 1.6E−02 | 1.29 | 2.4 |
| 9077 | 9077_st2 | | | | | | | | | | | | | | | | | | | | | |
| hsa-asg- | hsa-asg- | 6.16 | 6.47 | 6.68 | 6.44 | 0.26 | 33 | 5.32 | 6.01 | 4.72 | 5.53 | 4.45 | 5.76 | 4.90 | 4.71 | 4.92 | 5.15 | 0.53 | 0 | 2.7E−03 | 1.29 | 2.4 |
| 13047 | 13047_st2 | | | | | | | | | | | | | | | | | | | | | |
| hsa-miR- | hsa-miR- | 6.90 | 7.42 | 7.57 | 7.30 | 0.35 | 100 | 5.39 | 6.35 | 5.35 | 5.81 | 6.39 | 6.64 | 5.25 | 5.80 | 7.06 | 6.01 | 0.64 | 44 | 8.3E−03 | 1.29 | 2.4 |
| 564 | 564_st2 | | | | | | | | | | | | | | | | | | | | | |
| hsa-asg- | hsa-asg- | 5.71 | 6.06 | 5.63 | 5.80 | 0.23 | 100 | 3.76 | 5.43 | 3.23 | 4.69 | 4.85 | 5.81 | 3.29 | 4.78 | 4.73 | 4.51 | 0.90 | 0 | 3.8E−02 | 1.29 | 2.4 |
| 9735 | 9735_st1 | | | | | | | | | | | | | | | | | | | | | |
| hsa-miR- | hsa-miR- | 6.91 | 7.67 | 7.55 | 7.38 | 0.41 | 100 | 6.42 | 6.72 | 6.06 | 6.22 | 5.80 | 6.66 | 5.59 | 5.77 | 5.53 | 6.09 | 0.45 | 100 | 1.3E−03 | 1.29 | 2.4 |
| 142-5p | 142-5p_st2 | | | | | | | | | | | | | | | | | | | | | |
| hsa-asg- | hsa-asg- | 6.07 | 6.01 | 5.89 | 5.99 | 0.09 | 100 | 5.29 | 4.55 | 4.61 | 4.26 | 5.07 | 4.80 | 4.38 | 4.87 | 4.47 | 4.70 | 0.33 | 0 | 7.7E−05 | 1.29 | 2.4 |
| 12512 | 12512_st1 | | | | | | | | | | | | | | | | | | | | | |
| hsa- | hsa- | 4.37 | 4.79 | 4.93 | 4.70 | 0.29 | 67 | 4.61 | 4.43 | 2.66 | 3.40 | 2.69 | 2.69 | 2.78 | 3.20 | 4.24 | 3.41 | 0.81 | 0 | 2.4E−02 | 1.29 | 2.4 |
| miR144 | miR144_st2 | | | | | | | | | | | | | | | | | | | | | |
| hsa-asg- | hsa-asg- | 7.94 | 8.17 | 7.92 | 8.01 | 0.14 | 100 | 6.30 | 7.92 | 6.29 | 6.53 | 6.76 | 8.07 | 5.84 | 6.21 | 6.61 | 6.73 | 0.77 | 100 | 1.8E−02 | 1.28 | 2.4 |
| 8633 | 8633_st1 | | | | | | | | | | | | | | | | | | | | | |
| hsa-asg- | hsa-asg- | 7.19 | 7.43 | 7.17 | 7.26 | 0.14 | 100 | 5.32 | 7.09 | 5.21 | 5.54 | 5.76 | 6.62 | 4.82 | 6.58 | 6.87 | 5.98 | 0.82 | 44 | 2.6E−02 | 1.28 | 2.4 |
| 3691 | 3691_st1 | | | | | | | | | | | | | | | | | | | | | |
| hsa-asg- | hsa-asg- | 9.68 | 9.72 | 9.44 | 9.61 | 0.15 | 100 | 7.80 | 8.89 | 7.98 | 8.34 | 8.50 | 8.92 | 7.74 | 8.39 | 8.46 | 8.33 | 0.43 | 100 | 5.7E−04 | 1.28 | 2.4 |
| 2739 | 2739_st2 | | | | | | | | | | | | | | | | | | | | | |
| hsa-asg- | hsa-asg- | 4.98 | 5.27 | 5.38 | 5.21 | 0.21 | 67 | 3.76 | 4.55 | 3.23 | 3.77 | 3.72 | 4.91 | 3.93 | 3.99 | 3.53 | 3.93 | 0.51 | 0 | 2.1E−03 | 1.28 | 2.4 |
| 961 | 961_st1 | | | | | | | | | | | | | | | | | | | | | |
| hsa-asg- | hsa-asg- | 9.26 | 9.68 | 9.15 | 9.36 | 0.28 | 100 | 8.76 | 8.57 | 7.49 | 7.93 | 8.92 | 8.49 | 7.38 | 7.99 | 7.22 | 8.08 | 0.63 | 100 | 7.6E−03 | 1.28 | 2.4 |
| 1573 | 1573_st2 | | | | | | | | | | | | | | | | | | | | | |
| hsa-asg- | hsa-asg- | 9.37 | 9.31 | 9.19 | 9.29 | 0.09 | 100 | 8.57 | 8.62 | 7.11 | 7.86 | 8.75 | 8.42 | 7.72 | 7.71 | 7.32 | 8.01 | 0.60 | 100 | 5.2E−03 | 1.28 | 2.4 |
| 3271 | 3271_st1 | | | | | | | | | | | | | | | | | | | | | |
| hsa- | hsa- | 5.42 | 3.44 | 4.64 | 4.50 | 0.99 | 33 | 2.61 | 4.16 | 3.67 | 2.51 | 3.68 | 3.69 | 2.64 | 2.78 | 3.25 | 3.22 | 0.60 | 0 | 2.0E−02 | 1.28 | 2.4 |
| cand207 | cand207_st1 | | | | | | | | | | | | | | | | | | | | | |
| hsa-asg- | hsa-asg- | 8.25 | 8.04 | 7.92 | 8.07 | 0.16 | 100 | 6.18 | 8.26 | 7.22 | 6.15 | 6.37 | 7.93 | 5.69 | 6.28 | 7.08 | 6.79 | 0.88 | 78 | 3.5E−02 | 1.28 | 2.4 |
| 6180 | 6180_st1 | | | | | | | | | | | | | | | | | | | | | |
| hsa-asg- | hsa-asg- | 9.34 | 9.44 | 9.28 | 9.35 | 0.08 | 67 | 8.13 | 9.14 | 7.25 | 7.72 | 7.94 | 9.30 | 7.32 | 8.58 | 7.32 | 8.08 | 0.78 | 11 | 2.1E−02 | 1.27 | 2.4 |
| 7753 | 7753_st2 | | | | | | | | | | | | | | | | | | | | | |
| hsa-asg- | hsa-asg- | 10.2 | 10.5 | 10.2 | 10.34 | 0.21 | 100 | 9.03 | 9.93 | 7.79 | 8.92 | 10.18 | 9.57 | 8.51 | 9.28 | 8.41 | 9.07 | 0.76 | 100 | 1.9E−02 | 1.27 | 2.4 |
| 11946 | 11946_st1 | | | | | | | | | | | | | | | | | | | | | |
| hsa-asg- | hsa-asg- | 7.57 | 8.12 | 7.64 | 7.78 | 0.30 | 100 | 7.46 | 6.92 | 6.58 | 7.00 | 6.90 | 6.76 | 6.73 | 5.93 | 4.24 | 6.50 | 0.94 | 89 | 4.8E−02 | 1.27 | 2.4 |
| 14170 | 14170_st1 | | | | | | | | | | | | | | | | | | | | | |
| hsa-asg- | hsa-asg- | 7.11 | 7.23 | 7.33 | 7.22 | 0.11 | 100 | 5.78 | 7.19 | 4.30 | 5.87 | 5.76 | 6.72 | 5.29 | 5.84 | 6.80 | 5.95 | 0.87 | 78 | 3.4E−02 | 1.27 | 2.4 |
| 4262 | 4262_st1 | | | | | | | | | | | | | | | | | | | | | |
| hsa-asg- | hsa-asg- | 7.62 | 7.56 | 7.19 | 7.46 | 0.24 | 100 | 5.92 | 7.17 | 4.90 | 6.10 | 6.96 | 6.72 | 5.43 | 6.42 | 6.06 | 6.19 | 0.73 | 67 | 1.6E−02 | 1.27 | 2.4 |
| 6189 | 6189_st2 | | | | | | | | | | | | | | | | | | | | | |
| hsa-miR- | hsa-miR- | 9.54 | 10.4 | 10.9 | 10.31 | 0.71 | 100 | 8.65 | 9.16 | 8.27 | 9.95 | 9.26 | 8.92 | 9.78 | 9.34 | 7.98 | 9.03 | 0.65 | 100 | 1.6E−02 | 1.27 | 2.4 |
| 486 | 486_st2 | | | | | | | | | | | | | | | | | | | | | |
| hsa-asg- | hsa-asg- | 10.1 | 10.3 | 9.98 | 10.14 | 0.16 | 100 | 8.55 | 9.77 | 8.46 | 8.38 | 9.02 | 9.64 | 8.09 | 9.63 | 8.28 | 8.87 | 0.66 | 100 | 9.0E−03 | 1.27 | 2.4 |
| 8163 | 8163_st1 | | | | | | | | | | | | | | | | | | | | | |
| hsa-asg- | hsa-asg- | 8.06 | 8.15 | 7.90 | 8.04 | 0.13 | 100 | 7.21 | 7.35 | 6.05 | 6.92 | 6.85 | 7.38 | 6.24 | 6.88 | 6.03 | 6.77 | 0.53 | 89 | 2.6E−03 | 1.27 | 2.4 |
| 12286 | 12286_st2 | | | | | | | | | | | | | | | | | | | | | |
| hsa-asg- | hsa-asg- | 9.70 | 10.1 | 9.67 | 9.83 | 0.25 | 100 | 8.51 | 9.23 | 7.30 | 8.59 | 9.51 | 9.36 | 7.83 | 8.48 | 8.25 | 8.56 | 0.73 | 22 | 1.6E−02 | 1.27 | 2.4 |
| 7044 | 7044_st1 | | | | | | | | | | | | | | | | | | | | | |
| hsa-asg- | hsa-asg- | 7.03 | 7.51 | 7.19 | 7.24 | 0.25 | 100 | 6.45 | 6.78 | 4.17 | 5.95 | 6.61 | 6.78 | 5.29 | 6.15 | 5.58 | 5.97 | 0.86 | 67 | 3.3E−02 | 1.27 | 2.4 |
| 3945 | 3945_st2 | | | | | | | | | | | | | | | | | | | | | |
| hsa-asg- | hsa-asg- | 7.65 | 7.67 | 7.48 | 7.60 | 0.10 | 100 | 6.59 | 7.20 | 5.58 | 5.78 | 6.90 | 6.78 | 5.51 | 6.78 | 5.82 | 6.33 | 0.65 | 56 | 8.2E−03 | 1.27 | 2.4 |
| 12424 | 12424_st2 | | | | | | | | | | | | | | | | | | | | | |
| hsa-asg- | hsa-asg- | 7.27 | 7.64 | 7.37 | 7.43 | 0.19 | 100 | 5.85 | 6.91 | 5.43 | 5.54 | 6.24 | 6.71 | 5.66 | 6.62 | 6.47 | 6.16 | 0.55 | 67 | 3.5E−03 | 1.27 | 2.4 |
| 8636 | 8636_st2 | | | | | | | | | | | | | | | | | | | | | |
| hsa-asg- | hsa-asg- | 7.87 | 8.21 | 7.76 | 7.95 | 0.23 | 100 | 7.13 | 7.55 | 5.09 | 6.57 | 7.74 | 7.29 | 6.05 | 6.60 | 6.09 | 6.68 | 0.85 | 89 | 3.2E−02 | 1.27 | 2.4 |
| 13041 | 13041_st1 | | | | | | | | | | | | | | | | | | | | | |
| hsa-asg- | hsa-asg- | 7.02 | 7.47 | 7.29 | 7.26 | 0.22 | 100 | 6.68 | 6.40 | 5.82 | 6.62 | 6.67 | 5.74 | 5.32 | 5.31 | 5.40 | 6.00 | 0.60 | 33 | 5.8E−03 | 1.27 | 2.4 |
| 8067 | 8067_st2 | | | | | | | | | | | | | | | | | | | | | |
| hsa-miR- | hsa-miR- | 7.79 | 8.13 | 7.23 | 7.72 | 0.45 | 0 | 6.20 | 7.38 | 4.98 | 6.22 | 7.00 | 6.98 | 5.50 | 6.57 | 7.24 | 6.45 | 0.81 | 11 | 3.0E−02 | 1.26 | 2.4 |
| 483 | 483-_st1 | | | | | | | | | | | | | | | | | | | | | |
| hsa-asg- | hsa-asg- | 8.68 | 9.07 | 8.61 | 8.79 | 0.25 | 100 | 7.20 | 8.61 | 6.24 | 7.12 | 8.36 | 7.86 | 6.94 | 7.43 | 7.93 | 7.52 | 0.74 | 89 | 1.8E−02 | 1.26 | 2.4 |
| 4990 | 4990_st2 | | | | | | | | | | | | | | | | | | | | | |
| hsa-cand6 | hsa- | 7.96 | 8.42 | 8.19 | 8.19 | 0.23 | 100 | 7.04 | 7.84 | 6.10 | 6.91 | 7.20 | 7.41 | 6.29 | 6.45 | 7.13 | 6.93 | 0.56 | 89 | 4.1E−03 | 1.26 | 2.4 |
| | cand6_st2 | | | | | | | | | | | | | | | | | | | | | |
| hsa-asg- | hsa-asg- | 8.54 | 8.81 | 8.58 | 8.64 | 0.15 | 0 | 7.92 | 8.13 | 6.51 | 7.17 | 7.90 | 7.81 | 6.76 | 7.38 | 6.87 | 7.38 | 0.59 | 44 | 5.0E−03 | 1.26 | 2.4 |
| 471 | 471_st1 | | | | | | | | | | | | | | | | | | | | | |
| hsa-asg- | hsa-asg- | 7.70 | 7.96 | 7.35 | 7.67 | 0.31 | 100 | 6.32 | 7.55 | 5.82 | 6.03 | 6.44 | 7.08 | 5.05 | 6.69 | 6.72 | 6.41 | 0.73 | 67 | 1.8E−02 | 1.26 | 2.4 |
| 468 | 468_st1 | | | | | | | | | | | | | | | | | | | | | |
| hsa-asg- | hsa-asg- | 7.06 | 7.41 | 7.33 | 7.27 | 0.18 | 100 | 5.07 | 6.85 | 6.22 | 5.69 | 6.28 | 6.86 | 5.59 | 6.34 | 5.20 | 6.01 | 0.66 | 33 | 9.9E−03 | 1.26 | 2.4 |
| 3112 | 3112_st1 | | | | | | | | | | | | | | | | | | | | | |
| hsa- | hsa- | 6.32 | 6.84 | 6.58 | 6.58 | 0.26 | 100 | 5.45 | 6.05 | 5.47 | 3.87 | 5.38 | 6.06 | 4.69 | 5.76 | 5.20 | 5.32 | 0.69 | 22 | 1.3E−02 | 1.26 | 2.4 |
| cand224 | cand224_st1 | | | | | | | | | | | | | | | | | | | | | |
| hsa-asg- | hsa-asg- | 7.25 | 7.71 | 7.56 | 7.51 | 0.24 | 100 | 6.40 | 7.11 | 5.62 | 6.29 | 6.84 | 7.07 | 5.12 | 5.89 | 5.93 | 6.25 | 0.68 | 56 | 1.2E−02 | 1.26 | 2.4 |
| 887 | 887_st2 | | | | | | | | | | | | | | | | | | | | | |
| hsa-asg- | hsa-asg- | 10.3 | 10.7 | 10.8 | 10.66 | 0.24 | 100 | 9.91 | 10.2 | 8.44 | 9.65 | 10.3 | 9.93 | 8.80 | 9.41 | 7.96 | 9.41 | 0.83 | 100 | 3.1E−02 | 1.26 | 2.4 |
| 4731 | 4731_st1 | | | | | | | | | | | | | | | | | | | | | |
| hsa-asg- | hsa-asg- | 4.42 | 5.03 | 4.37 | 4.61 | 0.37 | 33 | 3.45 | 3.92 | 3.23 | 3.28 | 2.83 | 4.43 | 3.29 | 3.44 | 2.33 | 3.35 | 0.60 | 0 | 7.2E−03 | 1.25 | 2.4 |
| 2441 | 2441_st1 | | | | | | | | | | | | | | | | | | | | | |
| hsa-asg- | hsa-asg- | 9.02 | 9.73 | 9.11 | 9.29 | 0.39 | 33 | 8.14 | 8.82 | 6.98 | 8.08 | 8.63 | 8.69 | 7.15 | 8.00 | 7.80 | 8.03 | 0.65 | 0 | 1.1E−02 | 1.25 | 2.4 |
| 9003 | 9003_st2 | | | | | | | | | | | | | | | | | | | | | |
| hsa-miR- | hsa-miR- | 4.61 | 3.72 | 3.39 | 3.91 | 0.63 | 33 | 3.21 | 2.71 | 3.23 | 1.93 | 2.69 | 2.85 | 2.48 | 2.08 | 2.74 | 2.66 | 0.44 | 0 | 3.1E−03 | 1.25 | 2.4 |
| 520h | 520h_st1 | | | | | | | | | | | | | | | | | | | | | |
| hsa-asg- | hsa-asg- | 8.87 | 8.93 | 8.54 | 8.78 | 0.21 | 100 | 7.80 | 8.50 | 6.59 | 7.27 | 7.48 | 8.06 | 6.95 | 7.72 | 7.38 | 7.53 | 0.57 | 100 | 4.9E−03 | 1.25 | 2.4 |
| 819 | 819_st1 | | | | | | | | | | | | | | | | | | | | | |
| hsa-asg- | hsa-asg- | 5.66 | 4.51 | 5.12 | 5.10 | 0.57 | 67 | 4.31 | 3.74 | 4.39 | 4.58 | 3.33 | 3.48 | 2.78 | 3.95 | 4.07 | 3.85 | 0.57 | 0 | 8.4E−03 | 1.25 | 2.4 |
| 14230 | 14230_st1 | | | | | | | | | | | | | | | | | | | | | |
| hsa-asg- | hsa-asg- | 8.19 | 8.69 | 8.43 | 8.44 | 0.25 | 100 | 7.37 | 8.05 | 6.22 | 7.22 | 7.51 | 7.76 | 6.46 | 7.07 | 7.03 | 7.19 | 0.58 | 100 | 5.5E−03 | 1.25 | 2.4 |
| 1174 | 1174_st2 | | | | | | | | | | | | | | | | | | | | | |
| hsa-asg- | hsa-asg- | 8.92 | 9.35 | 8.96 | 9.07 | 0.24 | 100 | 8.10 | 8.33 | 6.99 | 7.49 | 8.30 | 7.92 | 6.92 | 8.10 | 8.30 | 7.83 | 0.56 | 100 | 4.3E−03 | 1.25 | 2.4 |
| 3345 | 3345_st1 | | | | | | | | | | | | | | | | | | | | | |
| hsa-asg- | hsa-asg- | 7.56 | 7.95 | 7.63 | 7.71 | 0.21 | 100 | 5.83 | 7.51 | 5.82 | 5.63 | 6.63 | 7.14 | 5.61 | 6.98 | 7.06 | 6.47 | 0.75 | 67 | 1.9E−02 | 1.24 | 2.4 |
| 3245 | 3245_st1 | | | | | | | | | | | | | | | | | | | | | |
| hsa-asg- | hsa-asg- | 4.98 | 5.97 | 4.86 | 5.27 | 0.61 | 33 | 3.76 | 4.95 | 4.02 | 3.08 | 4.27 | 4.65 | 2.64 | 4.28 | 4.60 | 4.03 | 0.76 | 0 | 2.8E−02 | 1.24 | 2.4 |
| 3003 | 3003_st1 | | | | | | | | | | | | | | | | | | | | | |
| hsa-asg-47 | hsa-asg- | 8.68 | 8.94 | 8.64 | 8.75 | 0.16 | 100 | 7.27 | 8.31 | 7.18 | 7.25 | 7.66 | 8.14 | 6.75 | 7.56 | 7.50 | 7.51 | 0.48 | 100 | 1.7E−03 | 1.24 | 2.4 |
| | 47_st1 | | | | | | | | | | | | | | | | | | | | | |
| hsa- | hsa- | 11.3 | 11.4 | 11.0 | 11.29 | 0.19 | 100 | 10.5 | 10.9 | 9.27 | 10.0 | 10.4 | 10.7 | 9.19 | 9.96 | 9.25 | 10.05 | 0.68 | 100 | 1.2E−02 | 1.24 | 2.4 |
| cand110 | cand110_st2 | | | | | | | | | | | | | | | | | | | | | |
| hsa-asg- | hsa-asg- | 10.7 | 10.8 | 9.93 | 10.53 | 0.52 | 100 | 10.2 | 10.2 | 8.59 | 9.21 | 9.68 | 10.0 | 8.47 | 9.08 | 8.15 | 9.29 | 0.78 | 89 | 2.9E−02 | 1.24 | 2.4 |
| 11514 | 11514_st1 | | | | | | | | | | | | | | | | | | | | | |
| hsa-asg- | hsa-asg- | 8.83 | 8.98 | 9.43 | 9.08 | 0.32 | 100 | 8.26 | 8.50 | 7.19 | 7.22 | 8.78 | 7.90 | 7.05 | 7.92 | 7.76 | 7.84 | 0.61 | 100 | 7.6E−03 | 1.24 | 2.4 |
| 4059 | 4059_st1 | | | | | | | | | | | | | | | | | | | | | |
| hsa-asg- | hsa-asg- | 6.36 | 7.43 | 7.24 | 7.01 | 0.57 | 67 | 6.06 | 6.25 | 5.01 | 6.11 | 6.26 | 6.10 | 5.12 | 5.60 | 5.44 | 5.77 | 0.49 | 11 | 4.3E−03 | 1.24 | 2.4 |
| 7240 | 7240_st1 | | | | | | | | | | | | | | | | | | | | | |
| hsa-asg- | hsa-asg- | 7.64 | 7.80 | 7.39 | 7.61 | 0.21 | 100 | 5.29 | 7.36 | 6.01 | 5.90 | 6.56 | 7.65 | 5.16 | 6.79 | 6.66 | 6.38 | 0.86 | 67 | 3.7E−02 | 1.24 | 2.4 |
| 12949 | 12949_st1 | | | | | | | | | | | | | | | | | | | | | |
| hsa-asg- | hsa-asg- | 9.24 | 9.10 | 9.02 | 9.12 | 0.11 | 100 | 7.80 | 8.72 | 7.48 | 7.27 | 8.12 | 8.43 | 7.13 | 8.14 | 7.87 | 7.88 | 0.53 | 100 | 3.0E−03 | 1.23 | 2.4 |
| 5123 | 5123_st1 | | | | | | | | | | | | | | | | | | | | | |
| hsa-asg- | hsa-asg- | 8.56 | 9.09 | 8.66 | 8.77 | 0.28 | 100 | 7.37 | 8.43 | 6.31 | 7.42 | 8.05 | 8.58 | 6.96 | 7.71 | 6.99 | 7.54 | 0.74 | 89 | 2.0E−02 | 1.23 | 2.3 |
| 8460 | 8460_st2 | | | | | | | | | | | | | | | | | | | | | |
| hsa-asg- | hsa-asg- | 9.38 | 9.70 | 9.46 | 9.51 | 0.17 | 100 | 8.18 | 9.04 | 6.93 | 8.28 | 8.92 | 8.91 | 7.81 | 8.38 | 8.08 | 8.28 | 0.66 | 100 | 1.1E−02 | 1.23 | 2.3 |
| 6802 | 6802_st1 | | | | | | | | | | | | | | | | | | | | | |
| hsa-asg- | hsa-asg- | 6.66 | 6.87 | 6.65 | 6.73 | 0.13 | 100 | 5.62 | 6.69 | 3.96 | 5.21 | 5.29 | 6.31 | 4.73 | 5.49 | 6.17 | 5.50 | 0.84 | 33 | 3.4E−02 | 1.23 | 2.3 |
| 11797 | 11797_st1 | | | | | | | | | | | | | | | | | | | | | |
| hsa-asg- | hsa-asg- | 8.68 | 8.77 | 8.70 | 8.72 | 0.05 | 100 | 7.32 | 8.36 | 6.79 | 7.06 | 7.23 | 7.98 | 7.08 | 7.70 | 7.89 | 7.49 | 0.52 | 100 | 2.5E−03 | 1.23 | 2.3 |
| 11228 | 11228_st1 | | | | | | | | | | | | | | | | | | | | | |
| hsa-asg- | hsa-asg- | 8.10 | 8.45 | 7.95 | 8.17 | 0.25 | 100 | 8.14 | 7.38 | 6.22 | 6.59 | 7.32 | 7.26 | 6.39 | 7.19 | 5.96 | 6.94 | 0.69 | 100 | 1.5E−02 | 1.23 | 2.3 |
| 7173 | 7173_st1 | | | | | | | | | | | | | | | | | | | | | |
| hsa-asg- | hsa-asg- | 5.86 | 6.55 | 6.39 | 6.27 | 0.36 | 100 | 5.51 | 6.04 | 3.79 | 5.16 | 5.24 | 5.70 | 4.00 | 5.19 | 4.73 | 5.04 | 0.75 | 22 | 2.3E−02 | 1.23 | 2.3 |
| 9321 | 9321_st1 | | | | | | | | | | | | | | | | | | | | | |
| hsa-miR- | hsa-miR- | 10.2 | 10.6 | 10.4 | 10.45 | 0.20 | 100 | 9.10 | 9.02 | 9.17 | 9.80 | 8.98 | 8.85 | 9.69 | 9.24 | 9.14 | 9.22 | 0.32 | 100 | 1.0E−04 | 1.23 | 2.3 |
| 422a | 422a_st1 | | | | | | | | | | | | | | | | | | | | | |
| hsa-asg- | hsa-asg- | 5.52 | 5.72 | 5.22 | 5.49 | 0.25 | 0 | 3.93 | 5.81 | 4.07 | 2.93 | 4.18 | 4.93 | 3.68 | 4.11 | 4.70 | 4.26 | 0.81 | 11 | 3.1E−02 | 1.23 | 2.3 |
| 4783 | 4783_st2 | | | | | | | | | | | | | | | | | | | | | |
| hsa-asg- | hsa-asg- | 8.08 | 7.99 | 7.70 | 7.93 | 0.20 | 100 | 7.35 | 7.48 | 6.46 | 6.04 | 6.83 | 7.46 | 5.80 | 6.65 | 6.24 | 6.70 | 0.63 | 100 | 9.0E−03 | 1.23 | 2.3 |
| 688 | 688_st2 | | | | | | | | | | | | | | | | | | | | | |
| hsa-asg- | hsa-asg- | 9.78 | 9.65 | 9.75 | 9.73 | 0.07 | 100 | 8.82 | 9.32 | 7.62 | 8.26 | 8.82 | 9.12 | 7.64 | 8.80 | 8.11 | 8.50 | 0.62 | 22 | 7.9E−03 | 1.22 | 2.3 |
| 3664 | 3664_st1 | | | | | | | | | | | | | | | | | | | | | |
| hsa-asg- | hsa-asg- | 5.58 | 5.78 | 5.06 | 5.47 | 0.37 | 100 | 4.37 | 5.04 | 4.12 | 3.52 | 4.79 | 5.05 | 3.17 | 4.96 | 3.25 | 4.25 | 0.77 | 0 | 2.7E−02 | 1.22 | 2.3 |
| 1897 | 1897_st1 | | | | | | | | | | | | | | | | | | | | | |
| hsa-asg- | hsa-asg- | 6.37 | 6.71 | 6.41 | 6.50 | 0.19 | 100 | 5.51 | 6.34 | 4.30 | 5.30 | 5.92 | 5.34 | 4.69 | 5.15 | 4.95 | 5.28 | 0.62 | 33 | 8.1E−03 | 1.22 | 2.3 |
| 551 | 551_st2 | | | | | | | | | | | | | | | | | | | | | |
| hsa-asg- | hsa-asg- | 5.86 | 5.80 | 5.15 | 5.60 | 0.40 | 67 | 4.02 | 5.72 | 3.54 | 3.21 | 4.45 | 4.97 | 3.85 | 5.22 | 4.47 | 4.38 | 0.82 | 11 | 3.5E−02 | 1.22 | 2.3 |
| 5228 | 5228_st2 | | | | | | | | | | | | | | | | | | | | | |
| hsa-asg- | hsa-asg- | 9.49 | 9.81 | 9.51 | 9.60 | 0.18 | 100 | 8.44 | 8.69 | 7.34 | 8.32 | 9.34 | 8.54 | 7.91 | 9.26 | 7.65 | 8.39 | 0.68 | 100 | 1.3E−02 | 1.22 | 2.3 |
| 8421 | 8421_st1 | | | | | | | | | | | | | | | | | | | | | |
| hsa-asg- | hsa-asg- | 6.19 | 7.05 | 7.01 | 6.75 | 0.49 | 100 | 5.39 | 6.14 | 4.98 | 4.97 | 5.77 | 6.20 | 5.16 | 5.79 | 5.39 | 5.53 | 0.47 | 33 | 3.0E−03 | 1.22 | 2.3 |
| 3073 | 3073_st2 | | | | | | | | | | | | | | | | | | | | | |
| hsa-asg- | hsa-asg- | 8.56 | 9.27 | 8.63 | 8.82 | 0.39 | 100 | 7.87 | 8.27 | 6.05 | 7.60 | 8.53 | 8.12 | 6.87 | 7.51 | 7.61 | 7.60 | 0.76 | 89 | 2.6E−02 | 1.22 | 2.3 |
| 6021 | 6021_st2 | | | | | | | | | | | | | | | | | | | | | |
| hsa-asg- | hsa-asg- | 10.8 | 11.1 | 10.8 | 10.94 | 0.18 | 100 | 10.1 | 10.2 | 8.94 | 9.79 | 10.6 | 10.1 | 9.14 | 9.69 | 8.74 | 9.73 | 0.66 | 100 | 1.2E−02 | 1.22 | 2.3 |
| 9503 | 9503_st2 | | | | | | | | | | | | | | | | | | | | | |
| hsa-asg- | hsa-asg- | 9.33 | 9.57 | 9.37 | 9.42 | 0.13 | 100 | 8.30 | 9.09 | 7.03 | 8.19 | 9.41 | 8.61 | 7.84 | 8.42 | 6.99 | 8.21 | 0.82 | 0 | 3.3E−02 | 1.21 | 2.3 |
| 746 | 746_st1 | | | | | | | | | | | | | | | | | | | | | |
| hsa-asg- | hsa-asg- | 7.61 | 7.87 | 7.83 | 7.77 | 0.14 | 100 | 6.75 | 7.11 | 5.82 | 6.30 | 7.28 | 7.02 | 6.32 | 6.42 | 5.98 | 6.56 | 0.51 | 89 | 2.7E−03 | 1.21 | 2.3 |
| 5265 | 5265_st1 | | | | | | | | | | | | | | | | | | | | | |
| hsa-asg- | hsa-asg- | 9.86 | 10.3 | 9.98 | 10.07 | 0.26 | 100 | 9.10 | 9.16 | 7.65 | 8.74 | 10.0 | 8.97 | 8.52 | 8.97 | 8.56 | 8.86 | 0.64 | 100 | 1.0E−02 | 1.21 | 2.3 |
| 1637 | 1637_st2 | | | | | | | | | | | | | | | | | | | | | |
| hsa-asg- | hsa-asg- | 8.81 | 9.40 | 8.96 | 9.06 | 0.31 | 100 | 7.72 | 8.58 | 6.29 | 7.51 | 8.98 | 8.34 | 7.01 | 7.98 | 8.18 | 7.84 | 0.82 | 89 | 3.5E−02 | 1.21 | 2.3 |
| 3167 | 3167_st1 | | | | | | | | | | | | | | | | | | | | | |
| hsa-asg- | hsa-asg- | 9.49 | 9.94 | 9.72 | 9.72 | 0.23 | 100 | 8.85 | 9.32 | 7.37 | 8.79 | 8.92 | 9.11 | 7.91 | 8.46 | 7.82 | 8.51 | 0.66 | 100 | 1.2E−02 | 1.21 | 2.3 |
| 504 | 504_st2 | | | | | | | | | | | | | | | | | | | | | |
| hsa-asg- | hsa-asg- | 5.14 | 5.77 | 5.55 | 5.48 | 0.32 | 67 | 3.93 | 5.61 | 3.91 | 2.69 | 4.08 | 5.37 | 3.93 | 4.28 | 4.67 | 4.27 | 0.87 | 11 | 4.4E−02 | 1.21 | 2.3 |
| 11483 | 11483_st1 | | | | | | | | | | | | | | | | | | | | | |
| hsa-asg- | hsa-asg- | 9.06 | 9.30 | 8.98 | 9.11 | 0.16 | 100 | 7.58 | 8.47 | 6.90 | 7.20 | 8.50 | 8.08 | 7.36 | 8.60 | 8.44 | 7.90 | 0.65 | 100 | 1.1E−02 | 1.21 | 2.3 |
| 9004 | 9004_st1 | | | | | | | | | | | | | | | | | | | | | |
| hsa-asg- | hsa-asg- | 9.13 | 9.39 | 9.12 | 9.21 | 0.16 | 100 | 8.74 | 8.73 | 7.36 | 7.60 | 8.43 | 8.35 | 7.14 | 7.72 | 7.95 | 8.00 | 0.59 | 100 | 6.5E−03 | 1.21 | 2.3 |
| 5032 | 5032_st2 | | | | | | | | | | | | | | | | | | | | | |
| hsa-asg- | hsa-asg- | 7.28 | 7.80 | 7.55 | 7.54 | 0.26 | 100 | 6.42 | 6.99 | 5.79 | 6.54 | 6.79 | 6.89 | 6.05 | 5.80 | 5.74 | 6.34 | 0.50 | 67 | 2.9E−03 | 1.21 | 2.3 |
| 1167 | 1167_st1 | | | | | | | | | | | | | | | | | | | | | |
| hsa-asg- | hsa-asg- | 5.71 | 5.30 | 4.96 | 5.32 | 0.37 | 67 | 3.76 | 4.76 | 3.67 | 4.00 | 4.14 | 4.89 | 3.17 | 4.52 | 4.16 | 4.12 | 0.55 | 0 | 5.8E−03 | 1.21 | 2.3 |
| 12893 | 12893_st2 | | | | | | | | | | | | | | | | | | | | | |
| hsa-asg- | hsa-asg- | 8.69 | 8.77 | 8.53 | 8.66 | 0.12 | 100 | 7.55 | 8.32 | 6.06 | 7.03 | 8.19 | 8.10 | 6.93 | 7.52 | 7.43 | 7.46 | 0.72 | 89 | 1.8E−02 | 1.20 | 2.3 |
| 9974 | 9974_st1 | | | | | | | | | | | | | | | | | | | | | |
| hsa-asg- | hsa-asg- | 7.79 | 8.43 | 8.10 | 8.10 | 0.32 | 0 | 8.02 | 7.00 | 5.74 | 6.88 | 7.99 | 7.03 | 6.49 | 7.25 | 5.69 | 6.90 | 0.83 | 33 | 3.8E−02 | 1.20 | 2.3 |
| 12880 | 12880_st1 | | | | | | | | | | | | | | | | | | | | | |
| hsa-asg- | hsa-asg- | 9.27 | 9.70 | 9.38 | 9.45 | 0.22 | 67 | 8.52 | 8.87 | 6.99 | 8.46 | 9.21 | 8.75 | 7.58 | 8.24 | 7.58 | 8.25 | 0.72 | 11 | 1.9E−02 | 1.20 | 2.3 |
| 3325 | 3325_st1 | | | | | | | | | | | | | | | | | | | | | |
| hsa-asg- | hsa-asg- | 9.76 | 10.1 | 10.0 | 9.97 | 0.20 | 100 | 8.63 | 8.58 | 8.70 | 9.41 | 8.77 | 8.37 | 9.21 | 8.76 | 8.49 | 8.77 | 0.34 | 100 | 1.9E−04 | 1.20 | 2.3 |
| 3998 | 3998_st1 | | | | | | | | | | | | | | | | | | | | | |
| hsa-asg- | hsa-asg- | 11.5 | 11.8 | 11.3 | 11.57 | 0.21 | 100 | 10.5 | 11.0 | 8.83 | 10.5 | 11.6 | 10.8 | 9.86 | 10.2 | 9.76 | 10.37 | 0.82 | 100 | 3.5E−02 | 1.20 | 2.3 |
| 6800 | 6800_st1 | | | | | | | | | | | | | | | | | | | | | |
| hsa-asg- | hsa-asg- | 8.45 | 8.48 | 8.69 | 8.54 | 0.13 | 0 | 8.10 | 7.93 | 6.72 | 7.33 | 7.72 | 7.49 | 6.61 | 7.79 | 6.39 | 7.34 | 0.62 | 44 | 9.3E−03 | 1.20 | 2.3 |
| 12421 | 12421_st1 | | | | | | | | | | | | | | | | | | | | | |
| hsa-asg- | hsa-asg- | 7.44 | 7.57 | 7.21 | 7.41 | 0.18 | 100 | 5.94 | 7.46 | 4.58 | 6.10 | 6.40 | 6.99 | 5.43 | 6.29 | 6.65 | 6.20 | 0.85 | 67 | 4.0E−02 | 1.20 | 2.3 |
| 7352 | 7352_st1 | | | | | | | | | | | | | | | | | | | | | |
| hsa-asg- | hsa-asg- | 9.38 | 9.71 | 9.56 | 9.55 | 0.17 | 100 | 7.78 | 9.28 | 7.43 | 7.92 | 9.11 | 9.27 | 7.66 | 8.02 | 8.69 | 8.35 | 0.74 | 100 | 2.1E−02 | 1.20 | 2.3 |
| 3670 | 3670_st1 | | | | | | | | | | | | | | | | | | | | | |
| hsa-asg- | hsa-asg- | 5.00 | 4.07 | 3.79 | 4.29 | 0.63 | 33 | 4.24 | 3.16 | 2.43 | 3.68 | 2.69 | 2.35 | 4.14 | 3.26 | 1.86 | 3.09 | 0.83 | 0 | 4.6E−02 | 1.20 | 2.3 |
| 1511 | 1511_st1 | | | | | | | | | | | | | | | | | | | | | |
| hsa- | hsa- | 11.1 | 12.1 | 12.3 | 11.90 | 0.67 | 100 | 10.9 | 10.9 | 9.74 | 10.9 | 11.5 | 10.4 | 10.4 | 11.5 | 9.71 | 10.70 | 0.67 | 100 | 2.3E−02 | 1.20 | 2.3 |
| cand421 | cand421_st1 | | | | | | | | | | | | | | | | | | | | | |
| hsa-asg- | hsa-asg- | 8.16 | 8.53 | 8.39 | 8.36 | 0.19 | 100 | 6.98 | 8.05 | 6.75 | 7.16 | 6.99 | 7.39 | 6.19 | 7.54 | 7.46 | 7.17 | 0.53 | 100 | 3.9E−03 | 1.19 | 2.3 |
| 5115 | 5115_st1 | | | | | | | | | | | | | | | | | | | | | |
| hsa-asg- | hsa-asg- | 8.83 | 9.30 | 8.73 | 8.96 | 0.30 | 100 | 7.35 | 8.30 | 6.68 | 7.70 | 8.70 | 8.37 | 7.41 | 8.00 | 7.35 | 7.76 | 0.64 | 100 | 1.1E−02 | 1.19 | 2.3 |
| 6952 | 6952_st1 | | | | | | | | | | | | | | | | | | | | | |
| hsa-asg- | hsa-asg- | 5.33 | 5.94 | 6.37 | 5.88 | 0.52 | 33 | 4.85 | 5.73 | 4.65 | 4.40 | 4.63 | 5.24 | 3.05 | 4.89 | 4.76 | 4.69 | 0.73 | 11 | 2.7E−02 | 1.19 | 2.3 |
| 2311 | 2311_st1 | | | | | | | | | | | | | | | | | | | | | |
| hsa-asg- | hsa-asg- | 6.64 | 6.86 | 6.52 | 6.67 | 0.17 | 100 | 5.35 | 6.30 | 3.85 | 4.97 | 6.28 | 5.93 | 4.90 | 5.66 | 6.13 | 5.49 | 0.81 | 44 | 3.4E−02 | 1.19 | 2.3 |
| 12867 | 12867_st2 | | | | | | | | | | | | | | | | | | | | | |
| hsa-miR-9* | hsa-miR-9-_st2 | 7.82 | 5.45 | 7.01 | 6.76 | 1.20 | 100 | 6.20 | 6.10 | 5.57 | 6.11 | 5.41 | 5.87 | 4.94 | 4.73 | 5.23 | 5.57 | 0.54 | 44 | 3.2E−02 | 1.19 | 2.3 |
| hsa-asg- | hsa-asg- | 4.65 | 5.35 | 5.31 | 5.10 | 0.39 | 67 | 4.49 | 3.83 | 4.30 | 4.36 | 4.39 | 4.49 | 2.48 | 3.64 | 3.25 | 3.92 | 0.69 | 0 | 1.9E−02 | 1.19 | 2.3 |
| 6352 | 6352_st2 | | | | | | | | | | | | | | | | | | | | | |
| hsa-asg- | hsa-asg- | 4.95 | 5.30 | 4.90 | 5.05 | 0.22 | 33 | 4.81 | 4.16 | 2.66 | 3.01 | 4.14 | 4.55 | 3.29 | 3.64 | 4.54 | 3.87 | 0.75 | 0 | 2.6E−02 | 1.18 | 2.3 |
| 8505 | 8505_st1 | | | | | | | | | | | | | | | | | | | | | |
| hsa-asg- | hsa-asg- | 9.64 | 9.40 | 9.02 | 9.35 | 0.31 | 33 | 8.65 | 8.85 | 7.59 | 7.87 | 8.57 | 8.56 | 7.39 | 8.20 | 7.82 | 8.17 | 0.52 | 0 | 4.3E−03 | 1.18 | 2.3 |
| 6092 | 6092_st2 | | | | | | | | | | | | | | | | | | | | | |
| hsa-asg- | hsa-asg- | 5.39 | 5.41 | 5.36 | 5.39 | 0.03 | 67 | 4.61 | 5.04 | 3.91 | 4.46 | 4.60 | 4.18 | 2.32 | 4.21 | 4.54 | 4.21 | 0.78 | 0 | 2.8E−02 | 1.18 | 2.3 |
| 5157 | 5157_st1 | | | | | | | | | | | | | | | | | | | | | |
| hsa-asg- | hsa-asg- | 8.22 | 8.53 | 8.52 | 8.42 | 0.18 | 100 | 7.06 | 8.05 | 5.89 | 6.98 | 8.40 | 7.98 | 6.11 | 7.13 | 7.58 | 7.24 | 0.86 | 89 | 4.4E−02 | 1.18 | 2.3 |
| 1888 | 1888_st1 | | | | | | | | | | | | | | | | | | | | | |
| hsa-asg- | hsa-asg- | 5.14 | 4.63 | 4.86 | 4.88 | 0.26 | 33 | 3.66 | 4.30 | 3.91 | 3.52 | 3.97 | 3.69 | 3.29 | 3.54 | 3.39 | 3.70 | 0.32 | 0 | 1.7E−04 | 1.18 | 2.3 |
| 11397 | 11397_st1 | | | | | | | | | | | | | | | | | | | | | |
| hsa-asg- | hsa-asg- | 4.98 | 5.33 | 5.06 | 5.12 | 0.18 | 67 | 3.33 | 4.95 | 3.79 | 4.00 | 4.33 | 4.60 | 2.78 | 3.83 | 3.87 | 3.94 | 0.65 | 0 | 1.2E−02 | 1.18 | 2.3 |
| 1917 | 1917_st1 | | | | | | | | | | | | | | | | | | | | | |
| hsa-asg- | hsa-asg- | 8.30 | 8.67 | 8.15 | 8.37 | 0.27 | 100 | 6.96 | 7.93 | 5.99 | 7.03 | 7.73 | 8.22 | 6.62 | 7.13 | 7.17 | 7.20 | 0.68 | 89 | 1.7E−02 | 1.18 | 2.3 |
| 9164 | 9164_st1 | | | | | | | | | | | | | | | | | | | | | |
| hsa-asg- | hsa-asg- | 8.27 | 8.43 | 7.80 | 8.17 | 0.33 | 0 | 7.33 | 7.51 | 6.23 | 6.94 | 7.76 | 7.34 | 6.29 | 7.64 | 5.89 | 6.99 | 0.69 | 33 | 1.9E−02 | 1.18 | 2.3 |
| 6149 | 6149_st2 | | | | | | | | | | | | | | | | | | | | | |
| hsa-asg- | hsa-asg- | 5.27 | 5.92 | 5.68 | 5.63 | 0.33 | 0 | 4.66 | 5.83 | 3.73 | 4.19 | 4.47 | 4.03 | 4.14 | 4.11 | 4.92 | 4.45 | 0.63 | 11 | 1.2E−02 | 1.17 | 2.3 |
| 5880 | 5880_st1 | | | | | | | | | | | | | | | | | | | | | |
| hsa-asg- | hsa-asg- | 7.02 | 7.12 | 6.91 | 7.02 | 0.11 | 100 | 6.27 | 6.78 | 5.30 | 5.54 | 6.06 | 6.13 | 4.82 | 6.10 | 5.61 | 5.85 | 0.59 | 44 | 7.5E−03 | 1.17 | 2.2 |
| 13963 | 13963_st2 | | | | | | | | | | | | | | | | | | | | | |
| hsa-asg- | hsa-asg- | 9.55 | 9.80 | 9.66 | 9.67 | 0.13 | 100 | 8.91 | 9.13 | 7.46 | 8.66 | 9.81 | 8.77 | 8.03 | 8.53 | 7.24 | 8.51 | 0.81 | 100 | 3.6E−02 | 1.17 | 2.2 |
| 7450 | 7450_st1 | | | | | | | | | | | | | | | | | | | | | |
| hsa-asg- | hsa-asg- | 5.08 | 5.75 | 5.46 | 5.43 | 0.33 | 100 | 4.31 | 5.04 | 2.43 | 4.30 | 4.18 | 4.97 | 4.07 | 4.35 | 4.73 | 4.26 | 0.77 | 11 | 3.2E−02 | 1.17 | 2.2 |
| 12353 | 12353_st2 | | | | | | | | | | | | | | | | | | | | | |
| hsa-asg- | hsa-asg- | 9.97 | 9.98 | 9.69 | 9.88 | 0.17 | 100 | 8.63 | 9.48 | 8.34 | 8.27 | 8.76 | 9.60 | 7.96 | 9.25 | 8.14 | 8.71 | 0.60 | 44 | 9.2E−03 | 1.16 | 2.2 |
| 11758 | 11758_st2 | | | | | | | | | | | | | | | | | | | | | |
| hsa-asg- | hsa-asg- | 7.60 | 8.21 | 8.14 | 7.98 | 0.33 | 100 | 6.86 | 7.66 | 5.94 | 6.77 | 7.39 | 7.64 | 5.96 | 6.77 | 6.38 | 6.82 | 0.65 | 89 | 1.6E−02 | 1.16 | 2.2 |
| 1641 | 1641_st1 | | | | | | | | | | | | | | | | | | | | | |
| hsa-asg- | hsa-asg- | 4.92 | 3.20 | 4.11 | 4.07 | 0.86 | 33 | 2.43 | 3.29 | 3.54 | 3.28 | 2.69 | 1.97 | 3.50 | 2.62 | 2.92 | 2.92 | 0.53 | 0 | 1.7E−02 | 1.16 | 2.2 |
| 9702 | 9702_st2 | | | | | | | | | | | | | | | | | | | | | |
| hsa-asg- | hsa-asg- | 6.16 | 5.65 | 5.65 | 5.82 | 0.30 | 100 | 4.31 | 5.58 | 3.79 | 4.81 | 4.00 | 5.27 | 3.85 | 4.52 | 5.81 | 4.66 | 0.75 | 11 | 3.0E−02 | 1.16 | 2.2 |
| 8444 | 8444_st2 | | | | | | | | | | | | | | | | | | | | | |
| hsa-asg- | hsa-asg- | 7.75 | 6.70 | 7.26 | 7.24 | 0.52 | 100 | 5.92 | 6.06 | 6.67 | 6.74 | 6.18 | 6.02 | 6.12 | 4.58 | 6.44 | 6.08 | 0.63 | 78 | 1.7E−02 | 1.16 | 2.2 |
| 11883 | 11883_st1 | | | | | | | | | | | | | | | | | | | | | |
| hsa-asg- | hsa-asg- | 8.72 | 9.35 | 8.89 | 8.99 | 0.32 | 100 | 7.69 | 8.46 | 6.52 | 7.99 | 9.10 | 8.38 | 7.37 | 7.63 | 7.36 | 7.83 | 0.76 | 100 | 3.1E−02 | 1.16 | 2.2 |
| 7426 | 7426_st1 | | | | | | | | | | | | | | | | | | | | | |
| hsa-asg- | hsa-asg- | 4.86 | 5.98 | 5.47 | 5.44 | 0.56 | 0 | 4.31 | 5.65 | 3.14 | 3.77 | 4.30 | 5.17 | 3.77 | 4.03 | 4.43 | 4.29 | 0.75 | 11 | 3.7E−02 | 1.15 | 2.2 |
| 202 | 202_st1 | | | | | | | | | | | | | | | | | | | | | |
| hsa-asg- | hsa-asg- | 6.50 | 7.16 | 6.79 | 6.81 | 0.33 | 100 | 4.94 | 5.85 | 4.78 | 5.97 | 6.85 | 6.13 | 5.22 | 5.43 | 5.80 | 5.66 | 0.64 | 44 | 1.5E−02 | 1.15 | 2.2 |
| 12395 | 12395_st2 | | | | | | | | | | | | | | | | | | | | | |
| hsa-asg- | hsa-asg- | 7.23 | 7.61 | 7.34 | 7.39 | 0.20 | 100 | 6.48 | 7.08 | 5.47 | 6.18 | 6.62 | 6.90 | 5.59 | 6.26 | 5.61 | 6.25 | 0.59 | 67 | 8.9E−03 | 1.15 | 2.2 |
| 10207 | 10207_st2 | | | | | | | | | | | | | | | | | | | | | |
| hsa-asg- | hsa-asg- | 5.76 | 6.38 | 5.61 | 5.91 | 0.41 | 100 | 5.32 | 5.30 | 4.02 | 4.63 | 4.85 | 4.84 | 4.49 | 5.20 | 4.24 | 4.77 | 0.47 | 44 | 3.5E−03 | 1.15 | 2.2 |
| 7437 | 7437_st2 | | | | | | | | | | | | | | | | | | | | | |
| hsa-asg- | hsa-asg- | 6.89 | 7.22 | 7.08 | 7.06 | 0.17 | 100 | 6.30 | 6.61 | 5.17 | 5.51 | 5.89 | 6.83 | 5.22 | 6.02 | 5.74 | 5.92 | 0.58 | 33 | 8.6E−03 | 1.14 | 2.2 |
| 7294 | 7294_st2 | | | | | | | | | | | | | | | | | | | | | |
| hsa-asg- | hsa-asg- | 5.08 | 5.72 | 4.96 | 5.25 | 0.40 | 100 | 4.49 | 4.76 | 2.86 | 4.08 | 4.63 | 3.95 | 3.50 | 4.35 | 4.40 | 4.11 | 0.61 | 11 | 1.3E−02 | 1.14 | 2.2 |
| 2395 | 2395_st1 | | | | | | | | | | | | | | | | | | | | | |
| hsa-asg- | hsa-asg- | 8.61 | 9.19 | 8.94 | 8.91 | 0.29 | 100 | 7.10 | 8.48 | 7.36 | 7.24 | 8.12 | 8.38 | 7.42 | 7.84 | 8.00 | 7.77 | 0.51 | 100 | 4.7E−03 | 1.14 | 2.2 |
| 11617 | 11617_st2 | | | | | | | | | | | | | | | | | | | | | |
| hsa-asg- | hsa-asg- | 8.95 | 9.23 | 9.03 | 9.07 | 0.15 | 100 | 7.83 | 8.73 | 6.79 | 7.67 | 8.08 | 8.47 | 7.39 | 7.93 | 8.48 | 7.93 | 0.60 | 100 | 1.0E−02 | 1.14 | 2.2 |
| 3999 | 3999_st1 | | | | | | | | | | | | | | | | | | | | | |
| hsa-asg- | hsa-asg- | 6.64 | 6.87 | 6.21 | 6.57 | 0.33 | 67 | 5.60 | 6.01 | 5.21 | 5.14 | 5.57 | 5.49 | 4.78 | 5.34 | 5.80 | 5.44 | 0.37 | 11 | 8.2E−04 | 1.14 | 2.2 |
| 1689 | 1689_st2 | | | | | | | | | | | | | | | | | | | | | |
| hsa-asg- | hsa-asg- | 10.4 | 10.7 | 10.5 | 10.60 | 0.15 | 100 | 9.80 | 10.2 | 8.40 | 9.53 | 10.3 | 10.0 | 9.02 | 9.27 | 8.51 | 9.46 | 0.72 | 100 | 2.4E−02 | 1.14 | 2.2 |
| 3456 | 3456_st2 | | | | | | | | | | | | | | | | | | | | | |
| hsa-asg- | hsa-asg- | 9.03 | 9.32 | 8.95 | 9.10 | 0.19 | 100 | 8.52 | 8.48 | 6.94 | 7.96 | 8.83 | 8.30 | 7.29 | 7.92 | 7.44 | 7.96 | 0.63 | 100 | 1.3E−02 | 1.14 | 2.2 |
| 2672 | 2672_st1 | | | | | | | | | | | | | | | | | | | | | |
| hsa-asg- | hsa-asg- | 7.97 | 8.12 | 7.83 | 7.97 | 0.14 | 0 | 6.34 | 7.32 | 7.49 | 6.84 | 6.74 | 6.98 | 6.59 | 6.69 | 6.55 | 6.84 | 0.37 | 22 | 5.0E−04 | 1.14 | 2.2 |
| 2862 | 2862_st1 | | | | | | | | | | | | | | | | | | | | | |
| hsa-asg- | hsa-asg- | 8.02 | 8.55 | 7.72 | 8.09 | 0.42 | 100 | 7.53 | 7.38 | 6.29 | 7.00 | 7.24 | 7.35 | 5.78 | 7.19 | 6.89 | 6.96 | 0.58 | 100 | 1.1E−02 | 1.13 | 2.2 |
| 10805 | 10805_st1 | | | | | | | | | | | | | | | | | | | | | |
| hsa-asg- | hsa-asg- | 8.80 | 9.37 | 9.24 | 9.14 | 0.30 | 100 | 8.15 | 8.69 | 7.14 | 7.74 | 8.29 | 8.32 | 7.61 | 8.46 | 7.68 | 8.01 | 0.49 | 100 | 4.3E−03 | 1.13 | 2.2 |
| 4031 | 4031_st2 | | | | | | | | | | | | | | | | | | | | | |
| hsa-asg- | hsa-asg- | 7.56 | 7.95 | 7.99 | 7.83 | 0.24 | 100 | 6.39 | 8.03 | 5.47 | 6.40 | 6.79 | 7.54 | 6.12 | 6.57 | 7.04 | 6.70 | 0.76 | 89 | 3.3E−02 | 1.13 | 2.2 |
| 9849 | 9849_st2 | | | | | | | | | | | | | | | | | | | | | |
| hsa- | hsa- | 4.69 | 3.79 | 4.11 | 4.19 | 0.46 | 33 | 2.61 | 3.53 | 3.06 | 3.15 | 3.33 | 3.59 | 1.79 | 3.99 | 2.54 | 3.07 | 0.67 | 0 | 2.2E−02 | 1.13 | 2.2 |
| cand208 | cand208_st1 | | | | | | | | | | | | | | | | | | | | | |
| hsa-asg- | hsa-asg- | 7.93 | 8.03 | 7.63 | 7.86 | 0.21 | 100 | 6.08 | 7.76 | 5.99 | 6.58 | 7.07 | 7.32 | 6.07 | 6.88 | 6.83 | 6.73 | 0.61 | 78 | 1.2E−02 | 1.13 | 2.2 |
| 7221 | 7221_st1 | | | | | | | | | | | | | | | | | | | | | |
| hsa-asg-88 | hsa-asg- | 11.0 | 11.3 | 11.0 | 11.14 | 0.15 | 100 | 10.3 | 10.7 | 8.78 | 9.84 | 10.5 | 10.5 | 9.41 | 10.2 | 9.73 | 10.02 | 0.63 | 100 | 1.3E−02 | 1.13 | 2.2 |
| | 88_st1 | | | | | | | | | | | | | | | | | | | | | |
| hsa-asg- | hsa-asg- | 8.43 | 8.61 | 8.40 | 8.48 | 0.11 | 100 | 7.01 | 8.30 | 6.55 | 6.92 | 8.24 | 7.76 | 6.83 | 7.19 | 7.35 | 7.35 | 0.62 | 100 | 1.2E−02 | 1.13 | 2.2 |
| 916 | 916_st1 | | | | | | | | | | | | | | | | | | | | | |
| hsa- | hsa- | 6.44 | 6.49 | 6.61 | 6.52 | 0.09 | 100 | 5.57 | 5.91 | 4.93 | 5.19 | 5.42 | 5.85 | 4.64 | 5.36 | 5.63 | 5.39 | 0.42 | 33 | 1.1E−03 | 1.13 | 2.2 |
| cand753 | cand753_st1 | | | | | | | | | | | | | | | | | | | | | |
| hsa-asg- | hsa-asg- | 6.25 | 6.47 | 6.53 | 6.42 | 0.15 | 33 | 5.39 | 6.40 | 4.34 | 5.64 | 5.24 | 5.38 | 4.14 | 4.85 | 6.24 | 5.29 | 0.77 | 0 | 3.3E−02 | 1.13 | 2.2 |
| 2563 | 2563_st2 | | | | | | | | | | | | | | | | | | | | | |
| hsa- | hsa- | 10.1 | 9.98 | 9.66 | 9.92 | 0.23 | 100 | 9.18 | 9.26 | 8.63 | 8.62 | 9.36 | 9.32 | 8.07 | 8.59 | 8.09 | 8.79 | 0.51 | 44 | 4.7E−03 | 1.12 | 2.2 |
| cand756 | cand756_st1 | | | | | | | | | | | | | | | | | | | | | |
| hsa-asg- | hsa-asg- | 9.16 | 9.32 | 9.22 | 9.23 | 0.08 | 100 | 7.97 | 8.85 | 6.83 | 8.01 | 8.70 | 8.51 | 7.51 | 8.48 | 8.12 | 8.11 | 0.64 | 100 | 1.4E−02 | 1.12 | 2.2 |
| 10716 | 10716_st1 | | | | | | | | | | | | | | | | | | | | | |
| hsa-asg- | hsa-asg- | 8.40 | 8.43 | 8.33 | 8.39 | 0.05 | 100 | 7.60 | 7.86 | 6.78 | 7.34 | 7.28 | 7.63 | 7.01 | 7.31 | 6.56 | 7.26 | 0.42 | 100 | 1.1E−03 | 1.12 | 2.2 |
| 7617 | 7617_st1 | | | | | | | | | | | | | | | | | | | | | |
| hsa-asg- | hsa-asg- | 10.8 | 10.8 | 10.6 | 10.78 | 0.14 | 100 | 10.3 | 10.4 | 8.97 | 9.73 | 10.2 | 10.4 | 9.07 | 9.28 | 8.35 | 9.66 | 0.77 | 100 | 3.4E−02 | 1.12 | 2.2 |
| 7096 | 7096_st2 | | | | | | | | | | | | | | | | | | | | | |
| hsa-asg- | hsa-asg- | 8.70 | 8.70 | 8.46 | 8.62 | 0.14 | 100 | 7.80 | 8.52 | 6.48 | 7.17 | 7.59 | 8.60 | 6.83 | 7.84 | 6.67 | 7.50 | 0.77 | 100 | 3.5E−02 | 1.12 | 2.2 |
| 6507 | 6507_st2 | | | | | | | | | | | | | | | | | | | | | |
| hsa-asg- | hsa-asg- | 8.64 | 8.72 | 8.31 | 8.56 | 0.22 | 100 | 7.23 | 8.44 | 6.10 | 7.33 | 7.93 | 7.92 | 6.86 | 7.30 | 7.82 | 7.44 | 0.69 | 89 | 2.3E−02 | 1.12 | 2.2 |
| 10195 | 10195_st2 | | | | | | | | | | | | | | | | | | | | | |
| hsa-asg- | hsa-asg- | 4.98 | 6.75 | 6.77 | 6.17 | 1.03 | 67 | 4.76 | 5.30 | 5.14 | 4.63 | 5.24 | 5.63 | 4.82 | 5.11 | 4.84 | 5.05 | 0.32 | 0 | 1.1E−02 | 1.12 | 2.2 |
| 4100 | 4100_st1 | | | | | | | | | | | | | | | | | | | | | |
| hsa-asg- | hsa-asg- | 6.19 | 6.60 | 6.24 | 6.34 | 0.22 | 100 | 5.07 | 6.44 | 4.47 | 4.76 | 5.56 | 5.75 | 4.90 | 5.15 | 4.95 | 5.23 | 0.60 | 22 | 1.1E−02 | 1.12 | 2.2 |
| 8990 | 8990_st1 | | | | | | | | | | | | | | | | | | | | | |
| hsa-asg- | hsa-asg- | 8.36 | 8.77 | 8.43 | 8.52 | 0.22 | 100 | 7.55 | 8.25 | 5.99 | 7.25 | 8.53 | 8.06 | 6.70 | 7.60 | 6.70 | 7.40 | 0.83 | 89 | 4.8E−02 | 1.12 | 2.2 |
| 6273 | 6273_st1 | | | | | | | | | | | | | | | | | | | | | |
| hsa-asg- | hsa-asg- | 8.03 | 8.33 | 8.21 | 8.19 | 0.15 | 100 | 7.06 | 7.66 | 6.48 | 6.97 | 7.51 | 7.78 | 6.47 | 7.09 | 6.64 | 7.07 | 0.49 | 100 | 3.7E−03 | 1.12 | 2.2 |
| 8626 | 8626_st1 | | | | | | | | | | | | | | | | | | | | | |
| hsa-miR- | hsa-miR- | 12.4 | 11.8 | 12.5 | 12.31 | 0.37 | 100 | 12.1 | 11.7 | 10.99 | 12.2 | 11.6 | 11.1 | 10.8 | 9.75 | 10.5 | 11.20 | 0.79 | 100 | 4.3E−02 | 1.11 | 2.2 |
| 152 | 152_st1 | | | | | | | | | | | | | | | | | | | | | |
| hsa-asg- | hsa-asg- | 7.09 | 7.02 | 6.84 | 6.98 | 0.13 | 100 | 6.62 | 6.79 | 4.47 | 5.51 | 5.63 | 6.17 | 5.05 | 6.56 | 6.02 | 5.87 | 0.78 | 44 | 3.7E−02 | 1.11 | 2.2 |
| 9574 | 9574_st2 | | | | | | | | | | | | | | | | | | | | | |
| hsa-asg- | hsa-asg- | 6.48 | 7.06 | 6.61 | 6.72 | 0.31 | 67 | 5.35 | 6.19 | 5.30 | 5.40 | 5.70 | 5.81 | 5.35 | 5.31 | 6.06 | 5.61 | 0.34 | 0 | 5.9E−04 | 1.11 | 2.2 |
| 9167 | 9167_st1 | | | | | | | | | | | | | | | | | | | | | |
| hsa-asg- | hsa-asg- | 6.08 | 6.38 | 5.86 | 6.11 | 0.26 | 100 | 4.17 | 5.77 | 4.75 | 4.60 | 5.10 | 5.68 | 4.44 | 5.29 | 5.18 | 5.00 | 0.55 | 11 | 8.0E−03 | 1.11 | 2.2 |
| 7569 | 7569_st1 | | | | | | | | | | | | | | | | | | | | | |
| hsa-asg- | hsa-asg- | 8.00 | 8.45 | 8.15 | 8.20 | 0.23 | 100 | 7.49 | 7.92 | 6.37 | 6.95 | 8.00 | 7.68 | 6.19 | 6.88 | 6.35 | 7.09 | 0.70 | 100 | 2.6E−02 | 1.11 | 2.2 |
| 10575 | 10575_st1 | | | | | | | | | | | | | | | | | | | | | |
| hsa-asg- | hsa-asg- | 9.29 | 9.37 | 9.21 | 9.29 | 0.08 | 100 | 8.47 | 9.07 | 7.13 | 8.05 | 8.71 | 8.76 | 7.39 | 8.25 | 7.79 | 8.18 | 0.65 | 100 | 1.7E−02 | 1.11 | 2.2 |
| 10392 | 10392_st1 | | | | | | | | | | | | | | | | | | | | | |
| hsa-asg- | hsa-asg- | 6.56 | 6.79 | 6.70 | 6.68 | 0.11 | 100 | 5.83 | 5.84 | 4.47 | 5.42 | 6.11 | 6.20 | 4.69 | 6.35 | 5.35 | 5.58 | 0.66 | 56 | 1.9E−02 | 1.10 | 2.1 |
| 4126 | 4126_st2 | | | | | | | | | | | | | | | | | | | | | |
| hsa- | hsa- | 9.37 | 9.52 | 9.36 | 9.42 | 0.09 | 100 | 8.28 | 9.05 | 7.48 | 8.11 | 8.51 | 8.95 | 7.81 | 8.32 | 8.34 | 8.32 | 0.50 | 100 | 4.0E−03 | 1.10 | 2.1 |
| cand634 | cand634_st1 | | | | | | | | | | | | | | | | | | | | | |
| hsa-asg- | hsa-asg- | 9.54 | 9.57 | 9.32 | 9.47 | 0.14 | 100 | 8.22 | 8.95 | 7.75 | 8.20 | 9.06 | 8.80 | 7.64 | 8.59 | 8.17 | 8.38 | 0.51 | 100 | 4.9E−03 | 1.10 | 2.1 |
| 10639 | 10639_st1 | | | | | | | | | | | | | | | | | | | | | |
| hsa-asg- | hsa-asg- | 9.78 | 10.0 | 9.63 | 9.81 | 0.20 | 100 | 8.53 | 9.49 | 8.14 | 8.49 | 8.83 | 9.72 | 8.02 | 9.38 | 7.83 | 8.71 | 0.68 | 100 | 2.3E−02 | 1.10 | 2.1 |
| 12919 | 12919_st2 | | | | | | | | | | | | | | | | | | | | | |
| hsa-asg- | hsa-asg- | 6.04 | 6.77 | 6.69 | 6.50 | 0.40 | 67 | 4.94 | 6.30 | 4.65 | 5.35 | 5.54 | 6.19 | 4.69 | 5.46 | 5.51 | 5.40 | 0.59 | 22 | 1.3E−02 | 1.10 | 2.1 |
| 7130 | 7130_st1 | | | | | | | | | | | | | | | | | | | | | |
| hsa-asg- | hsa-asg- | 6.28 | 6.71 | 6.68 | 6.56 | 0.24 | 100 | 5.29 | 6.65 | 4.34 | 5.39 | 5.62 | 6.24 | 4.64 | 5.58 | 5.40 | 5.46 | 0.71 | 22 | 2.8E−02 | 1.10 | 2.1 |
| 1169 | 1169_st2 | | | | | | | | | | | | | | | | | | | | | |
| hsa-asg- | hsa-asg- | 7.96 | 8.06 | 7.64 | 7.89 | 0.22 | 100 | 6.27 | 7.60 | 5.82 | 6.57 | 7.25 | 7.49 | 6.36 | 6.84 | 6.90 | 6.79 | 0.59 | 89 | 1.2E−02 | 1.10 | 2.1 |
| 3941 | 3941_st2 | | | | | | | | | | | | | | | | | | | | | |
| hsa-asg-53 | hsa-asg- | 9.91 | 10.1 | 9.77 | 9.95 | 0.21 | 100 | 9.57 | 9.41 | 8.12 | 8.94 | 9.61 | 9.62 | 8.25 | 8.53 | 7.65 | 8.86 | 0.75 | 100 | 3.4E−02 | 1.10 | 2.1 |
| | 53_st2 | | | | | | | | | | | | | | | | | | | | | |
| hsa-asg- | hsa-asg- | 7.84 | 8.21 | 7.81 | 7.95 | 0.23 | 0 | 7.14 | 7.34 | 5.74 | 7.17 | 7.73 | 7.47 | 6.57 | 7.01 | 5.56 | 6.86 | 0.76 | 22 | 3.8E−02 | 1.09 | 2.1 |
| 3677 | 3677_st1 | | | | | | | | | | | | | | | | | | | | | |
| hsa-asg- | hsa-asg- | 8.68 | 8.89 | 8.73 | 8.77 | 0.11 | 100 | 7.96 | 8.67 | 7.07 | 7.98 | 8.26 | 8.25 | 6.62 | 7.17 | 7.10 | 7.67 | 0.70 | 100 | 2.6E−02 | 1.09 | 2.1 |
| 3947 | 3947_st1 | | | | | | | | | | | | | | | | | | | | | |
| hsa-asg- | hsa-asg- | 10.6 | 10.7 | 10.6 | 10.70 | 0.07 | 100 | 10.6 | 10.1 | 9.03 | 9.64 | 10.2 | 10.2 | 8.97 | 9.38 | 8.17 | 9.61 | 0.79 | 100 | 4.4E−02 | 1.09 | 2.1 |
| 6398 | 6398_st2 | | | | | | | | | | | | | | | | | | | | | |
| hsa-asg- | hsa-asg- | 6.71 | 7.02 | 6.68 | 6.81 | 0.19 | 100 | 5.96 | 6.49 | 4.98 | 5.95 | 5.97 | 6.41 | 4.82 | 5.62 | 5.27 | 5.72 | 0.59 | 44 | 1.2E−02 | 1.09 | 2.1 |
| 9885 | 9885_st1 | | | | | | | | | | | | | | | | | | | | | |
| hsa-asg- | hsa-asg- | 4.21 | 5.00 | 4.83 | 4.68 | 0.41 | 33 | 3.93 | 4.86 | 3.23 | 3.63 | 3.85 | 3.48 | 1.97 | 4.14 | 3.25 | 3.59 | 0.79 | 0 | 4.9E−02 | 1.09 | 2.1 |
| 7327 | 7327_st1 | | | | | | | | | | | | | | | | | | | | | |
| hsa-asg- | hsa-asg- | 8.77 | 9.17 | 8.90 | 8.95 | 0.20 | 100 | 7.88 | 8.67 | 7.01 | 7.28 | 8.30 | 8.41 | 7.21 | 7.92 | 8.08 | 7.86 | 0.58 | 100 | 1.1E−02 | 1.09 | 2.1 |
| 6018 | 6018_st2 | | | | | | | | | | | | | | | | | | | | | |
| hsa-asg- | hsa-asg- | 6.49 | 6.74 | 6.72 | 6.65 | 0.14 | 100 | 5.25 | 6.46 | 4.47 | 5.32 | 6.44 | 6.19 | 4.73 | 5.72 | 5.53 | 5.57 | 0.71 | 33 | 2.8E−02 | 1.08 | 2.1 |
| 8446 | 8446_st2 | | | | | | | | | | | | | | | | | | | | | |
| hsa-asg- | hsa-asg- | 7.68 | 7.84 | 7.87 | 7.80 | 0.10 | 100 | 6.55 | 7.62 | 6.24 | 6.23 | 6.85 | 7.29 | 6.02 | 6.66 | 6.95 | 6.71 | 0.52 | 100 | 6.2E−03 | 1.08 | 2.1 |
| 2318 | 2318_st1 | | | | | | | | | | | | | | | | | | | | | |
| hsa-asg- | hsa-asg- | 4.88 | 5.78 | 5.63 | 5.43 | 0.48 | 67 | 4.49 | 5.08 | 4.21 | 3.87 | 3.68 | 5.17 | 4.00 | 3.74 | 4.89 | 4.35 | 0.58 | 0 | 1.6E−02 | 1.08 | 2.1 |
| 9560 | 9560_st2 | | | | | | | | | | | | | | | | | | | | | |
| hsa-asg- | hsa-asg- | 7.29 | 7.21 | 7.55 | 7.35 | 0.18 | 100 | 6.57 | 6.36 | 6.43 | 7.06 | 6.10 | 6.13 | 5.59 | 5.93 | 6.25 | 6.27 | 0.42 | 89 | 1.6E−03 | 1.08 | 2.1 |
| 14175 | 14175_st1 | | | | | | | | | | | | | | | | | | | | | |
| hsa-asg- | hsa-asg- | 6.62 | 6.55 | 6.54 | 6.57 | 0.04 | 100 | 5.68 | 6.18 | 3.91 | 5.06 | 6.25 | 5.86 | 5.16 | 6.03 | 5.27 | 5.49 | 0.74 | 44 | 3.3E−02 | 1.08 | 2.1 |
| 331 | 331_st2 | | | | | | | | | | | | | | | | | | | | | |
| hsa-asg- | hsa-asg- | 9.09 | 9.20 | 9.01 | 9.10 | 0.10 | 100 | 8.15 | 8.64 | 6.92 | 8.08 | 8.88 | 8.21 | 7.44 | 8.11 | 7.74 | 8.02 | 0.59 | 100 | 1.2E−02 | 1.08 | 2.1 |
| 9479 | 9479_st2 | | | | | | | | | | | | | | | | | | | | | |
| hsa-asg- | hsa-asg- | 6.79 | 7.36 | 7.25 | 7.13 | 0.30 | 100 | 6.46 | 6.98 | 5.12 | 5.85 | 6.89 | 6.79 | 5.12 | 5.80 | 5.51 | 6.06 | 0.74 | 44 | 3.8E−02 | 1.08 | 2.1 |
| 8546 | 8546_st1 | | | | | | | | | | | | | | | | | | | | | |
| hsa-asg- | hsa-asg- | 6.14 | 6.38 | 6.00 | 6.17 | 0.19 | 33 | 4.37 | 5.99 | 4.65 | 4.58 | 5.25 | 5.75 | 5.12 | 5.17 | 4.97 | 5.09 | 0.53 | 11 | 7.5E−03 | 1.08 | 2.1 |
| 7214 | 7214_st1 | | | | | | | | | | | | | | | | | | | | | |
| hsa- | hsa- | 8.26 | 8.80 | 8.48 | 8.51 | 0.27 | 100 | 7.58 | 8.13 | 6.44 | 7.29 | 8.06 | 8.05 | 6.91 | 7.46 | 7.03 | 7.44 | 0.58 | 100 | 1.2E−02 | 1.08 | 2.1 |
| cand559 | cand559_st1 | | | | | | | | | | | | | | | | | | | | | |
| hsa-asg- | hsa-asg- | 7.71 | 7.75 | 7.77 | 7.74 | 0.03 | 100 | 6.74 | 7.36 | 5.94 | 6.55 | 6.82 | 7.11 | 5.66 | 7.28 | 6.52 | 6.67 | 0.58 | 78 | 1.0E−02 | 1.08 | 2.1 |
| 9883 | 9883_st1 | | | | | | | | | | | | | | | | | | | | | |
| hsa-asg- | hsa-asg- | 5.90 | 5.47 | 5.82 | 5.73 | 0.23 | 67 | 4.71 | 5.33 | 4.75 | 4.74 | 5.21 | 4.84 | 3.77 | 4.41 | 4.16 | 4.66 | 0.49 | 0 | 4.9E−03 | 1.08 | 2.1 |
| 472 | 472_st2 | | | | | | | | | | | | | | | | | | | | | |
| hsa-asg- | hsa-asg- | 9.94 | 10.2 | 9.91 | 10.03 | 0.18 | 100 | 9.04 | 9.46 | 8.04 | 8.98 | 9.81 | 9.70 | 8.27 | 8.93 | 8.38 | 8.96 | 0.63 | 67 | 1.8E−02 | 1.07 | 2.1 |
| 13079 | 13079_st2 | | | | | | | | | | | | | | | | | | | | | |
| hsa-asg- | hsa-asg- | 4.54 | 5.55 | 6.86 | 5.65 | 1.16 | 33 | 4.55 | 5.01 | 3.73 | 4.84 | 4.72 | 5.01 | 4.14 | 4.98 | 4.20 | 4.58 | 0.46 | 0 | 3.5E−02 | 1.07 | 2.1 |
| 9491 | 9491_st1 | | | | | | | | | | | | | | | | | | | | | |
| hsa-asg- | hsa-asg- | 7.34 | 7.46 | 7.29 | 7.36 | 0.09 | 0 | 6.04 | 7.10 | 5.41 | 5.94 | 6.93 | 6.24 | 5.55 | 6.77 | 6.63 | 6.29 | 0.60 | 11 | 1.4E−02 | 1.07 | 2.1 |
| 3745 | 3745_st1 | | | | | | | | | | | | | | | | | | | | | |
| hsa-asg- | hsa-asg- | 9.13 | 9.72 | 9.24 | 9.37 | 0.31 | 100 | 8.11 | 8.95 | 7.19 | 8.12 | 9.59 | 8.66 | 7.51 | 8.25 | 8.26 | 8.29 | 0.72 | 100 | 3.4E−02 | 1.07 | 2.1 |
| 2228 | 2228_st1 | | | | | | | | | | | | | | | | | | | | | |
| hsa-asg- | hsa-asg- | 6.53 | 6.79 | 6.30 | 6.54 | 0.25 | 100 | 4.76 | 6.27 | 5.28 | 5.14 | 5.78 | 6.03 | 4.33 | 5.32 | 6.29 | 5.47 | 0.68 | 44 | 2.6E−02 | 1.07 | 2.1 |
| 4156 | 4156_st2 | | | | | | | | | | | | | | | | | | | | | |
| hsa-asg- | hsa-asg- | 5.02 | 6.07 | 6.55 | 5.88 | 0.79 | 33 | 3.76 | 5.32 | 4.17 | 5.12 | 4.87 | 4.57 | 5.37 | 4.98 | 5.12 | 4.81 | 0.54 | 0 | 2.3E−02 | 1.07 | 2.1 |
| 8896 | 8896_st2 | | | | | | | | | | | | | | | | | | | | | |
| hsa-asg- | hsa-asg- | 6.47 | 6.72 | 6.53 | 6.57 | 0.13 | 67 | 5.11 | 6.01 | 4.72 | 5.50 | 5.50 | 5.88 | 4.82 | 5.94 | 6.03 | 5.50 | 0.51 | 0 | 6.0E−03 | 1.07 | 2.1 |
| 6250 | 6250_st2 | | | | | | | | | | | | | | | | | | | | | |
| hsa-asg- | hsa-asg- | 6.82 | 7.64 | 8.13 | 7.53 | 0.66 | 100 | 6.83 | 6.69 | 5.85 | 6.49 | 7.41 | 7.07 | 6.38 | 6.08 | 5.33 | 6.46 | 0.64 | 78 | 3.1E−02 | 1.07 | 2.1 |
| 12735 | 12735_st1 | | | | | | | | | | | | | | | | | | | | | |
| hsa-asg- | hsa-asg- | 5.84 | 4.95 | 5.69 | 5.49 | 0.48 | 67 | 5.45 | 5.12 | 3.54 | 3.91 | 5.07 | 4.55 | 3.50 | 4.28 | 4.40 | 4.42 | 0.70 | 11 | 3.5E−02 | 1.07 | 2.1 |
| 3090 | 3090_st1 | | | | | | | | | | | | | | | | | | | | | |
| hsa-asg- | hsa-asg- | 10.7 | 10.9 | 10.6 | 10.79 | 0.17 | 100 | 9.68 | 10.3 | 8.78 | 9.49 | 10.3 | 10.1 | 9.22 | 9.72 | 9.80 | 9.72 | 0.52 | 100 | 6.3E−03 | 1.07 | 2.1 |
| 8253 | 8253_st2 | | | | | | | | | | | | | | | | | | | | | |
| hsa-asg- | hsa-asg- | 5.64 | 6.61 | 6.54 | 6.26 | 0.55 | 67 | 5.25 | 5.81 | 4.96 | 4.88 | 5.09 | 6.06 | 4.82 | 4.60 | 5.29 | 5.19 | 0.47 | 22 | 8.1E−03 | 1.07 | 2.1 |
| 11943 | 11943_st1 | | | | | | | | | | | | | | | | | | | | | |
| hsa-asg- | hsa-asg- | 8.55 | 8.61 | 8.15 | 8.44 | 0.25 | 0 | 7.47 | 7.79 | 6.35 | 6.95 | 8.73 | 7.65 | 7.08 | 7.19 | 7.12 | 7.37 | 0.66 | 44 | 2.4E−02 | 1.07 | 2.1 |
| 11486 | 11486_st1 | | | | | | | | | | | | | | | | | | | | | |
| hsa-asg- | hsa-asg- | 7.60 | 7.92 | 7.87 | 7.80 | 0.17 | 100 | 6.78 | 7.55 | 5.55 | 6.27 | 7.83 | 6.09 | 6.14 | 7.32 | 7.02 | 6.73 | 0.76 | 89 | 4.2E−02 | 1.07 | 2.1 |
| 8941 | 8941_st2 | | | | | | | | | | | | | | | | | | | | | |
| hsa-asg- | hsa-asg- | 4.81 | 5.41 | 4.22 | 4.81 | 0.60 | 33 | 3.07 | 4.49 | 3.23 | 3.91 | 4.50 | 3.37 | 3.50 | 3.64 | 3.97 | 3.74 | 0.52 | 0 | 1.3E−02 | 1.07 | 2.1 |
| 3030 | 3030_st2 | | | | | | | | | | | | | | | | | | | | | |
| hsa-asg- | hsa-asg- | 10.1 | 10.1 | 10.1 | 10.14 | 0.04 | 100 | 9.38 | 10.1 | 8.31 | 8.73 | 9.29 | 9.42 | 8.39 | 9.05 | 8.96 | 9.07 | 0.56 | 100 | 9.9E−03 | 1.07 | 2.1 |
| 5927 | 5927_st2 | | | | | | | | | | | | | | | | | | | | | |
| hsa-asg- | hsa-asg- | 7.89 | 8.24 | 8.28 | 8.14 | 0.21 | 100 | 6.65 | 8.30 | 5.94 | 6.70 | 7.32 | 7.98 | 6.54 | 6.99 | 7.22 | 7.07 | 0.73 | 89 | 3.6E−02 | 1.07 | 2.1 |
| 976 | 976_st2 | | | | | | | | | | | | | | | | | | | | | |
| hsa-asg- | hsa-asg- | 6.43 | 6.89 | 7.14 | 6.82 | 0.36 | 67 | 5.51 | 6.28 | 5.26 | 5.75 | 6.45 | 6.14 | 5.40 | 5.89 | 5.12 | 5.76 | 0.47 | 11 | 5.3E−03 | 1.07 | 2.1 |
| 1319 | 1319_st2 | | | | | | | | | | | | | | | | | | | | | |
| hsa-asg- | hsa-asg- | 8.08 | 7.98 | 7.99 | 8.02 | 0.05 | 0 | 6.25 | 7.26 | 6.71 | 7.29 | 6.63 | 7.22 | 6.29 | 7.50 | 7.41 | 6.95 | 0.48 | 33 | 4.2E−03 | 1.06 | 2.1 |
| 7131 | 7131_st1 | | | | | | | | | | | | | | | | | | | | | |
| hsa- | hsa- | 5.52 | 6.54 | 5.82 | 5.96 | 0.52 | 33 | 4.99 | 5.85 | 4.26 | 4.69 | 5.32 | 5.09 | 4.78 | 4.66 | 4.43 | 4.90 | 0.48 | 11 | 8.8E−03 | 1.06 | 2.1 |
| cand960 | cand960_st2 | | | | | | | | | | | | | | | | | | | | | |
| hsa-asg- | hsa-asg- | 5.44 | 5.78 | 5.93 | 5.72 | 0.25 | 100 | 4.49 | 5.64 | 4.30 | 4.04 | 4.21 | 5.09 | 4.49 | 4.52 | 5.09 | 4.65 | 0.52 | 11 | 7.1E−03 | 1.06 | 2.1 |
| 8508 | 8508_st2 | | | | | | | | | | | | | | | | | | | | | |
| hsa-asg- | hsa-asg- | 10.2 | 10.3 | 10.0 | 10.20 | 0.17 | 100 | 9.40 | 9.72 | 8.49 | 8.88 | 9.39 | 9.50 | 8.32 | 9.40 | 9.16 | 9.14 | 0.48 | 78 | 4.2E−03 | 1.06 | 2.1 |
| 12681 | 12681_st1 | | | | | | | | | | | | | | | | | | | | | |
| hsa-asg- | hsa-asg- | 9.41 | 9.69 | 9.52 | 9.54 | 0.14 | 100 | 8.57 | 9.15 | 7.29 | 8.36 | 9.18 | 9.10 | 7.88 | 8.50 | 8.27 | 8.48 | 0.63 | 11 | 1.8E−02 | 1.06 | 2.1 |
| 7400 | 7400_st1 | | | | | | | | | | | | | | | | | | | | | |
| hsa-asg- | hsa-asg- | 5.58 | 6.12 | 6.18 | 5.96 | 0.33 | 100 | 4.61 | 5.46 | 4.75 | 4.88 | 5.21 | 4.97 | 4.27 | 5.32 | 4.60 | 4.90 | 0.39 | 0 | 1.7E−03 | 1.06 | 2.1 |
| 4246 | 4246_st2 | | | | | | | | | | | | | | | | | | | | | |
| hsa-asg- | hsa-asg- | 7.03 | 7.63 | 7.72 | 7.46 | 0.37 | 100 | 6.14 | 7.02 | 5.97 | 6.35 | 6.51 | 6.89 | 5.75 | 6.57 | 6.40 | 6.40 | 0.41 | 67 | 2.7E−03 | 1.06 | 2.1 |
| 9209 | 9209_st2 | | | | | | | | | | | | | | | | | | | | | |
| hsa-asg- | hsa-asg- | 4.92 | 5.39 | 5.06 | 5.12 | 0.24 | 67 | 4.02 | 4.86 | 2.86 | 4.15 | 4.60 | 4.75 | 3.17 | 3.74 | 4.40 | 4.06 | 0.69 | 0 | 3.0E−02 | 1.06 | 2.1 |
| 9504 | 9504_st1 | | | | | | | | | | | | | | | | | | | | | |
| hsa-asg- | hsa-asg- | 7.83 | 8.29 | 8.39 | 8.17 | 0.30 | 0 | 6.77 | 7.73 | 5.80 | 6.88 | 7.26 | 7.67 | 6.47 | 7.32 | 8.11 | 7.11 | 0.71 | 22 | 3.4E−02 | 1.06 | 2.1 |
| 1241 | 1241_st2 | | | | | | | | | | | | | | | | | | | | | |
| hsa-asg- | hsa-asg- | 6.50 | 6.73 | 6.66 | 6.63 | 0.12 | 100 | 5.68 | 5.25 | 6.12 | 6.30 | 5.59 | 5.60 | 5.35 | 5.06 | 5.20 | 5.57 | 0.42 | 11 | 1.8E−03 | 1.06 | 2.1 |
| 11181 | 11181_st1 | | | | | | | | | | | | | | | | | | | | | |
| hsa-asg- | hsa-asg- | 8.42 | 8.62 | 8.16 | 8.40 | 0.23 | 100 | 7.13 | 8.08 | 6.60 | 7.54 | 8.14 | 7.94 | 6.18 | 7.11 | 7.35 | 7.34 | 0.67 | 100 | 2.6E−02 | 1.06 | 2.1 |
| 4146 | 4146_st2 | | | | | | | | | | | | | | | | | | | | | |
| hsa-asg- | hsa-asg- | 6.57 | 6.80 | 6.77 | 6.71 | 0.12 | 100 | 5.78 | 6.40 | 4.65 | 5.51 | 5.97 | 6.19 | 4.94 | 6.02 | 5.44 | 5.65 | 0.58 | 22 | 1.2E−02 | 1.06 | 2.1 |
| 11652 | 11652_st1 | | | | | | | | | | | | | | | | | | | | | |
| hsa-asg- | hsa-asg- | 10.1 | 10.3 | 10.3 | 10.26 | 0.12 | 100 | 10.4 | 9.69 | 8.35 | 9.15 | 9.77 | 9.22 | 8.72 | 9.63 | 7.86 | 9.20 | 0.79 | 100 | 4.9E−02 | 1.05 | 2.1 |
| 13606 | 13606_st2 | | | | | | | | | | | | | | | | | | | | | |
| hsa-asg- | hsa-asg- | 7.11 | 6.97 | 6.88 | 6.99 | 0.12 | 100 | 5.92 | 6.92 | 4.72 | 5.75 | 6.24 | 6.30 | 5.22 | 6.12 | 6.24 | 5.94 | 0.65 | 22 | 2.2E−02 | 1.05 | 2.1 |
| 2991 | 2991_st1 | | | | | | | | | | | | | | | | | | | | | |
| hsa-asg- | hsa-asg- | 9.11 | 9.83 | 8.91 | 9.28 | 0.48 | 100 | 8.25 | 8.62 | 7.03 | 8.27 | 9.33 | 8.51 | 7.91 | 8.07 | 8.13 | 8.23 | 0.61 | 100 | 2.3E−02 | 1.05 | 2.1 |
| 8607 | 8607_st1 | | | | | | | | | | | | | | | | | | | | | |
| hsa-asg- | hsa-asg- | 7.14 | 7.17 | 7.08 | 7.13 | 0.04 | 100 | 6.27 | 6.87 | 4.72 | 6.39 | 6.22 | 6.86 | 5.69 | 5.98 | 5.71 | 6.08 | 0.67 | 67 | 2.4E−02 | 1.05 | 2.1 |
| 3525 | 3525_st1 | | | | | | | | | | | | | | | | | | | | | |
| hsa-asg- | hsa-asg- | 9.34 | 9.45 | 9.25 | 9.35 | 0.10 | 67 | 8.79 | 8.83 | 7.34 | 8.15 | 8.89 | 8.84 | 7.86 | 8.13 | 7.85 | 8.30 | 0.56 | 11 | 1.1E−02 | 1.05 | 2.1 |
| 1133 | 1133_st2 | | | | | | | | | | | | | | | | | | | | | |
| hsa-asg- | hsa-asg- | 4.21 | 4.47 | 4.59 | 4.43 | 0.20 | 33 | 3.21 | 4.30 | 1.92 | 3.28 | 3.72 | 4.03 | 2.78 | 3.64 | 3.53 | 3.38 | 0.71 | 0 | 3.3E−02 | 1.05 | 2.1 |
| 4335 | 4335_st1 | | | | | | | | | | | | | | | | | | | | | |
| hsa-asg- | hsa-asg- | 7.36 | 7.07 | 7.43 | 7.29 | 0.19 | 100 | 6.32 | 7.09 | 6.03 | 6.08 | 6.14 | 6.40 | 5.69 | 6.03 | 6.41 | 6.24 | 0.39 | 78 | 1.3E−03 | 1.05 | 2.1 |
| 11938 | 11938_st1 | | | | | | | | | | | | | | | | | | | | | |
| hsa-asg-92 | hsa-asg- | 5.62 | 5.51 | 5.52 | 5.55 | 0.06 | 100 | 4.17 | 5.58 | 4.02 | 4.15 | 4.27 | 5.20 | 3.85 | 4.21 | 5.14 | 4.51 | 0.62 | 11 | 1.8E−02 | 1.04 | 2.1 |
| | 92_st1 | | | | | | | | | | | | | | | | | | | | | |
| hsa-asg- | hsa-asg- | 5.99 | 6.02 | 6.45 | 6.15 | 0.26 | 100 | 4.61 | 5.79 | 4.54 | 4.71 | 5.10 | 5.82 | 4.07 | 5.69 | 5.63 | 5.11 | 0.65 | 22 | 2.5E−02 | 1.04 | 2.1 |
| 12306 | 12306_st2 | | | | | | | | | | | | | | | | | | | | | |
| hsa-asg- | hsa-asg- | 10.6 | 10.6 | 10.4 | 10.56 | 0.13 | 100 | 9.82 | 10.0 | 8.85 | 9.26 | 10.2 | 9.75 | 8.98 | 9.42 | 9.27 | 9.52 | 0.49 | 100 | 5.4E−03 | 1.04 | 2.1 |
| 11389 | 11389_st1 | | | | | | | | | | | | | | | | | | | | | |
| hsa- | hsa- | 5.08 | 5.75 | 6.13 | 5.65 | 0.53 | 100 | 3.93 | 5.15 | 3.91 | 4.49 | 5.76 | 5.27 | 4.86 | 3.83 | 4.32 | 4.61 | 0.69 | 33 | 3.9E−02 | 1.04 | 2.1 |
| cand443 | cand443_st2 | | | | | | | | | | | | | | | | | | | | | |
| hsa-miR- | hsa-miR- | 10.5 | 10.1 | 10.5 | 10.41 | 0.25 | 100 | 10.2 | 9.76 | 9.14 | 9.80 | 9.38 | 9.47 | 9.04 | 8.51 | 9.05 | 9.37 | 0.50 | 100 | 7.2E−03 | 1.04 | 2.1 |
| 151 | 151_st2 | | | | | | | | | | | | | | | | | | | | | |
| hsa-asg- | hsa-asg- | 6.50 | 6.96 | 6.51 | 6.65 | 0.26 | 100 | 5.65 | 6.90 | 5.39 | 5.25 | 5.80 | 6.29 | 5.43 | 5.02 | 4.81 | 5.62 | 0.65 | 22 | 2.5E−02 | 1.04 | 2.1 |
| 10807 | 10807_st2 | | | | | | | | | | | | | | | | | | | | | |
| hsa-asg- | hsa-asg- | 7.95 | 8.56 | 8.19 | 8.24 | 0.31 | 100 | 7.20 | 7.68 | 6.42 | 6.56 | 7.83 | 7.72 | 6.47 | 7.46 | 7.43 | 7.20 | 0.57 | 100 | 1.4E−02 | 1.04 | 2.1 |
| 9627 | 9627_st1 | | | | | | | | | | | | | | | | | | | | | |
| hsa-asg- | hsa-asg- | 6.37 | 6.75 | 6.68 | 6.60 | 0.21 | 100 | 5.18 | 6.41 | 5.45 | 5.28 | 5.58 | 6.46 | 4.90 | 4.96 | 5.87 | 5.57 | 0.58 | 22 | 1.4E−02 | 1.04 | 2.1 |
| 3553 | 3553_st1 | | | | | | | | | | | | | | | | | | | | | |
| hsa-asg- | hsa-asg- | 7.95 | 7.92 | 7.68 | 7.85 | 0.15 | 100 | 6.39 | 7.83 | 5.82 | 6.51 | 7.22 | 7.13 | 6.32 | 7.06 | 7.06 | 6.82 | 0.61 | 89 | 1.7E−02 | 1.04 | 2.0 |
| 8687 | 8687_st1 | | | | | | | | | | | | | | | | | | | | | |
| hsa-asg- | hsa-asg- | 10.7 | 10.9 | 10.6 | 10.76 | 0.17 | 100 | 10.1 | 10.2 | 9.52 | 9.55 | 10.3 | 10.0 | 9.14 | 9.69 | 8.95 | 9.73 | 0.48 | 100 | 5.3E−03 | 1.03 | 2.0 |
| 8568 | 8568_st1 | | | | | | | | | | | | | | | | | | | | | |
| hsa-asg- | hsa-asg- | 9.74 | 10.2 | 9.89 | 9.95 | 0.24 | 100 | 9.24 | 9.50 | 7.87 | 8.25 | 9.62 | 9.02 | 8.28 | 9.25 | 9.18 | 8.91 | 0.62 | 100 | 2.0E−02 | 1.03 | 2.0 |
| 8520 | 8520_st1 | | | | | | | | | | | | | | | | | | | | | |
| hsa-asg- | hsa-asg- | 7.88 | 7.67 | 7.51 | 7.69 | 0.19 | 0 | 6.57 | 7.08 | 6.28 | 6.48 | 7.01 | 7.04 | 5.58 | 7.09 | 6.77 | 6.65 | 0.50 | 11 | 6.7E−03 | 1.03 | 2.0 |
| 12092 | 12092_st1 | | | | | | | | | | | | | | | | | | | | | |
| hsa-asg- | hsa-asg- | 5.50 | 6.40 | 6.33 | 6.08 | 0.50 | 67 | 5.92 | 5.21 | 4.58 | 4.97 | 5.83 | 4.31 | 4.86 | 4.44 | 5.29 | 5.04 | 0.57 | 0 | 1.9E−02 | 1.03 | 2.0 |
| 5888 | 5888_st1 | | | | | | | | | | | | | | | | | | | | | |
| hsa-asg- | hsa-asg- | 5.37 | 5.26 | 4.86 | 5.16 | 0.27 | 100 | 4.31 | 5.27 | 4.47 | 4.08 | 4.11 | 4.55 | 3.40 | 4.28 | 2.74 | 4.13 | 0.72 | 11 | 3.9E−02 | 1.03 | 2.0 |
| 9903 | 9903_st2 | | | | | | | | | | | | | | | | | | | | | |
| hsa-asg- | hsa-asg- | 9.89 | 10.1 | 9.79 | 9.93 | 0.17 | 100 | 9.19 | 9.27 | 8.30 | 9.24 | 9.56 | 9.37 | 8.56 | 8.50 | 8.11 | 8.90 | 0.53 | 100 | 9.2E−03 | 1.03 | 2.0 |
| 1903 | 1903_st2 | | | | | | | | | | | | | | | | | | | | | |
| hsa-asg- | hsa-asg- | 10.7 | 10.9 | 10.7 | 10.82 | 0.08 | 100 | 10.1 | 10.3 | 8.76 | 9.92 | 10.8 | 10.2 | 9.27 | 9.68 | 8.93 | 9.79 | 0.69 | 100 | 3.2E−02 | 1.03 | 2.0 |
| 8958 | 8958_st1 | | | | | | | | | | | | | | | | | | | | | |
| hsa-asg- | hsa-asg- | 5.42 | 5.53 | 5.67 | 5.54 | 0.13 | 100 | 4.37 | 5.46 | 3.39 | 4.36 | 4.21 | 5.13 | 4.14 | 4.47 | 5.09 | 4.51 | 0.63 | 11 | 2.1E−02 | 1.03 | 2.0 |
| 7067 | 7067_st1 | | | | | | | | | | | | | | | | | | | | | |
| hsa-asg- | hsa-asg- | 8.83 | 8.94 | 8.56 | 8.77 | 0.19 | 0 | 8.25 | 8.32 | 7.03 | 7.40 | 7.91 | 7.99 | 6.95 | 7.89 | 8.00 | 7.75 | 0.50 | 78 | 7.1E−03 | 1.03 | 2.0 |
| 11336 | 11336_st2 | | | | | | | | | | | | | | | | | | | | | |
| hsa-asg- | hsa-asg- | 7.20 | 7.48 | 7.41 | 7.36 | 0.14 | 100 | 6.37 | 7.44 | 5.72 | 6.10 | 6.64 | 7.07 | 4.94 | 6.37 | 6.40 | 6.34 | 0.73 | 78 | 4.0E−02 | 1.03 | 2.0 |
| 8562 | 8562_st1 | | | | | | | | | | | | | | | | | | | | | |
| hsa-asg- | hsa-asg- | 8.53 | 8.96 | 8.78 | 8.76 | 0.21 | 100 | 7.09 | 8.64 | 6.66 | 7.37 | 8.40 | 8.44 | 6.93 | 7.75 | 8.30 | 7.73 | 0.74 | 100 | 4.5E−02 | 1.02 | 2.0 |
| 11513 | 11513_st1 | | | | | | | | | | | | | | | | | | | | | |
| hsa-asg- | hsa-asg- | 5.26 | 6.01 | 5.63 | 5.63 | 0.37 | 67 | 4.85 | 4.76 | 4.54 | 5.12 | 4.55 | 4.18 | 4.98 | 4.35 | 4.16 | 4.61 | 0.34 | 0 | 1.3E−03 | 1.02 | 2.0 |
| 128 | 128_st2 | | | | | | | | | | | | | | | | | | | | | |
| hsa-asg- | hsa-asg- | 4.52 | 5.11 | 4.83 | 4.82 | 0.30 | 33 | 3.45 | 4.43 | 3.06 | 4.15 | 2.90 | 4.43 | 3.50 | 3.99 | 4.24 | 3.79 | 0.58 | 0 | 1.7E−02 | 1.02 | 2.0 |
| 13754 | 13754_st2 | | | | | | | | | | | | | | | | | | | | | |
| hsa-asg- | hsa-asg- | 10.6 | 11.0 | 10.6 | 10.81 | 0.24 | 100 | 9.50 | 10.0 | 8.74 | 9.61 | 10.7 | 10.2 | 9.42 | 9.99 | 9.69 | 9.79 | 0.58 | 89 | 1.6E−02 | 1.02 | 2.0 |
| 11623 | 11623_st1 | | | | | | | | | | | | | | | | | | | | | |
| hsa-miR-518c* | hsa-miR- | 5.23 | 5.03 | 4.96 | 5.07 | 0.14 | 33 | 3.85 | 5.19 | 4.39 | 3.15 | 3.39 | 4.43 | 3.68 | 3.74 | 4.67 | 4.05 | 0.66 | 0 | 2.7E−02 | 1.02 | 2.0 |
| | 518c-_st2 | | | | | | | | | | | | | | | | | | | | | |
| hsa-asg- | hsa-asg- | 8.06 | 8.11 | 8.00 | 8.06 | 0.06 | 100 | 7.38 | 8.09 | 6.15 | 6.88 | 7.28 | 7.11 | 6.33 | 7.10 | 7.00 | 7.04 | 0.57 | 89 | 1.3E−02 | 1.02 | 2.0 |
| 8188 | 8188_st1 | | | | | | | | | | | | | | | | | | | | | |
| hsa-asg- | hsa-asg- | 6.61 | 6.74 | 6.53 | 6.62 | 0.11 | 100 | 5.60 | 6.24 | 5.41 | 5.30 | 5.68 | 5.89 | 5.09 | 5.67 | 5.56 | 5.60 | 0.33 | 44 | 4.8E−04 | 1.02 | 2.0 |
| 4836 | 4836_st2 | | | | | | | | | | | | | | | | | | | | | |
| hsa-asg- | hsa-asg- | 6.92 | 6.51 | 6.85 | 6.76 | 0.22 | 100 | 5.78 | 6.21 | 5.58 | 5.63 | 6.15 | 6.22 | 4.86 | 5.68 | 5.55 | 5.74 | 0.43 | 33 | 3.1E−03 | 1.02 | 2.0 |
| 4564 | 4564_st2 | | | | | | | | | | | | | | | | | | | | | |
| hsa-asg- | hsa-asg- | 5.62 | 5.97 | 5.71 | 5.77 | 0.18 | 100 | 4.55 | 5.55 | 4.75 | 4.00 | 4.70 | 4.93 | 3.93 | 4.96 | 5.39 | 4.75 | 0.55 | 11 | 1.1E−02 | 1.02 | 2.0 |
| 11898 | 11898_st2 | | | | | | | | | | | | | | | | | | | | | |
| hsa-asg- | hsa-asg- | 7.66 | 8.07 | 7.64 | 7.79 | 0.25 | 100 | 7.11 | 7.20 | 6.15 | 7.09 | 7.86 | 7.14 | 6.02 | 6.63 | 5.74 | 6.77 | 0.69 | 78 | 3.4E−02 | 1.02 | 2.0 |
| 7227 | 7227_st1 | | | | | | | | | | | | | | | | | | | | | |
| hsa-asg- | hsa-asg- | 9.69 | 9.87 | 9.75 | 9.77 | 0.09 | 100 | 8.30 | 9.69 | 7.88 | 8.33 | 8.72 | 9.50 | 8.07 | 9.09 | 9.19 | 8.75 | 0.65 | 44 | 2.5E−02 | 1.02 | 2.0 |
| 4851 | 4851_st1 | | | | | | | | | | | | | | | | | | | | | |
| hsa-asg- | hsa-asg- | 9.54 | 9.72 | 9.64 | 9.64 | 0.09 | 100 | 9.49 | 9.56 | 7.69 | 8.32 | 9.00 | 9.12 | 7.74 | 8.71 | 7.94 | 8.62 | 0.73 | 100 | 4.1E−02 | 1.02 | 2.0 |
| 8631 | 8631_st1 | | | | | | | | | | | | | | | | | | | | | |
| hsa-asg- | hsa-asg- | 7.25 | 7.64 | 7.37 | 7.42 | 0.20 | 100 | 6.14 | 7.24 | 5.55 | 6.20 | 6.69 | 7.15 | 5.75 | 6.61 | 6.32 | 6.41 | 0.58 | 56 | 1.5E−02 | 1.02 | 2.0 |
| 9501 | 9501_st1 | | | | | | | | | | | | | | | | | | | | | |
| hsa-asg- | hsa-asg- | 6.97 | 7.87 | 7.91 | 7.58 | 0.53 | 100 | 6.54 | 7.38 | 6.10 | 7.10 | 6.15 | 6.97 | 6.36 | 5.98 | 6.56 | 6.57 | 0.48 | 78 | 1.1E−02 | 1.01 | 2.0 |
| 6924 | 6924_st1 | | | | | | | | | | | | | | | | | | | | | |
| hsa-asg- | hsa-asg- | 6.99 | 7.27 | 7.21 | 7.16 | 0.15 | 100 | 5.35 | 7.02 | 5.55 | 5.92 | 6.26 | 6.79 | 5.29 | 6.31 | 6.82 | 6.14 | 0.66 | 44 | 2.8E−02 | 1.01 | 2.0 |
| 7069 | 7069_st1 | | | | | | | | | | | | | | | | | | | | | |
| hsa-asg- | hsa-asg- | 5.74 | 6.26 | 5.94 | 5.98 | 0.26 | 33 | 5.70 | 5.28 | 4.43 | 4.04 | 5.25 | 5.49 | 4.38 | 5.17 | 4.97 | 4.97 | 0.56 | 0 | 1.4E−02 | 1.01 | 2.0 |
| 11791 | 11791_st2 | | | | | | | | | | | | | | | | | | | | | |
| hsa-asg- | hsa-asg- | 6.99 | 7.46 | 7.05 | 7.17 | 0.26 | 100 | 5.39 | 6.57 | 5.69 | 5.86 | 5.99 | 6.74 | 6.29 | 6.10 | 6.78 | 6.16 | 0.48 | 67 | 6.7E−03 | 1.01 | 2.0 |
| 13893 | 13893_st2 | | | | | | | | | | | | | | | | | | | | | |
| hsa-asg- | hsa-asg- | 7.49 | 7.84 | 7.61 | 7.65 | 0.18 | 100 | 6.18 | 7.52 | 5.88 | 6.35 | 6.78 | 7.52 | 6.11 | 6.36 | 7.02 | 6.64 | 0.61 | 89 | 2.0E−02 | 1.01 | 2.0 |
| 7883 | 7883_st2 | | | | | | | | | | | | | | | | | | | | | |
| hsa-asg- | hsa-asg- | 9.31 | 9.72 | 9.38 | 9.47 | 0.22 | 67 | 8.61 | 8.84 | 7.44 | 8.12 | 9.18 | 8.91 | 7.87 | 8.78 | 8.36 | 8.46 | 0.56 | 11 | 1.3E−02 | 1.01 | 2.0 |
| 7097 | 7097_st2 | | | | | | | | | | | | | | | | | | | | | |
| hsa-asg- | hsa-asg- | 11.5 | 11.5 | 11.3 | 11.47 | 0.14 | 100 | 10.7 | 11.1 | 9.87 | 10.2 | 11.0 | 10.9 | 9.76 | 10.4 | 10.0 | 10.46 | 0.52 | 100 | 9.1E−03 | 1.01 | 2.0 |
| 11685 | 11685_st2 | | | | | | | | | | | | | | | | | | | | | |
| hsa-asg- | hsa-asg- | 8.04 | 8.13 | 8.09 | 8.09 | 0.04 | 100 | 6.51 | 7.96 | 6.73 | 6.92 | 6.98 | 7.83 | 6.55 | 6.76 | 7.50 | 7.08 | 0.55 | 100 | 1.1E−02 | 1.00 | 2.0 |
| 13841 | 13841_st2 | | | | | | | | | | | | | | | | | | | | | |
| hsa-asg- | hsa-asg- | 8.10 | 8.24 | 8.18 | 8.17 | 0.07 | 100 | 7.00 | 8.19 | 6.22 | 6.63 | 7.72 | 7.81 | 6.78 | 6.86 | 7.32 | 7.17 | 0.64 | 100 | 2.4E−02 | 1.00 | 2.0 |
| 3710 | 3710_st1 | | | | | | | | | | | | | | | | | | | | | |
| hsa-asg- | hsa-asg- | 5.44 | 5.57 | 5.23 | 5.41 | 0.17 | 33 | 4.49 | 4.55 | 4.68 | 3.95 | 4.21 | 4.24 | 4.27 | 4.21 | 5.09 | 4.41 | 0.34 | 0 | 6.6E−04 | 1.00 | 2.0 |
| 13791 | 13791_st2 | | | | | | | | | | | | | | | | | | | | | |
| hsa- | hsa- | 8.97 | 9.39 | 8.90 | 9.09 | 0.27 | 100 | 8.13 | 8.64 | 6.93 | 7.81 | 8.90 | 8.44 | 7.47 | 8.06 | 8.36 | 8.08 | 0.61 | 100 | 2.2E−02 | 1.00 | 2.0 |
| cand924 | cand924_st2 | | | | | | | | | | | | | | | | | | | | | |
| hsa-asg- | hsa-asg- | 5.14 | 5.39 | 4.11 | 4.88 | 0.68 | 33 | 4.02 | 4.37 | 3.67 | 3.73 | 4.21 | 4.65 | 3.17 | 2.78 | 4.32 | 3.88 | 0.61 | 0 | 3.6E−02 | 1.00 | 2.0 |
| 8022 | 8022_st2 | | | | | | | | | | | | | | | | | | | | | |
| hsa-asg- | hsa-asg- | 6.83 | 7.13 | 7.19 | 7.05 | 0.19 | 100 | 6.06 | 6.85 | 5.33 | 5.97 | 6.44 | 6.72 | 5.02 | 6.32 | 5.75 | 6.05 | 0.61 | 67 | 2.2E−02 | 1.00 | 2.0 |
| 8628 | 8628_st2 | | | | | | | | | | | | | | | | | | | | | |
| hsa-asg- | hsa-asg- | 7.01 | 7.11 | 7.02 | 7.05 | 0.06 | 100 | 6.25 | 6.49 | 5.85 | 5.82 | 6.11 | 5.99 | 5.32 | 6.29 | 6.30 | 6.05 | 0.35 | 11 | 7.9E−04 | 1.00 | 2.0 |
| 8490 | 8490_st1 | | | | | | | | | | | | | | | | | | | | | |
| hsa-asg- | hsa-asg- | 10.0 | 10.3 | 10.2 | 10.21 | 0.14 | 100 | 9.19 | 9.82 | 8.18 | 8.98 | 9.39 | 9.86 | 8.97 | 9.00 | 9.46 | 9.21 | 0.51 | 78 | 8.9E−03 | 1.00 | 2.0 |
| 1643 | 1643_st2 | | | | | | | | | | | | | | | | | | | | | |

SD, standard deviation;
%, percentage of samples expressing miRNA above background levels;
Log2Diff, difference in VSN-transformed expression between NBR and LNneg samples.

### Example 20

### miRNAs Differentally Expressed Between Normal Bladder Tissue and Normal Lymph Nodes

[0298] To identify miRNAs that may be useful markers for metastasis of cancerous bladder cells to lymph nodes, the inventors identified miRNAs that are expressed at significantly higher levels in normal bladder tissue than in cancer-negative lymph nodes.

[0299] Total RNA, purified from three separate normal human bladder tissue samples (FirstChoice® Human Bladder Total RNA, cat. no. AM7990; Ambion, Austin, Tex., USA) and from nine normal human lymph node samples (FirstChoice® Human Lymph Node Total RNA, cat. no. AM7894; Ambion, Austin, Tex., USA) was purchased from Ambion. miRNA purification and labeling and microarray expression analyses were performed as described above in Example 2.

[0300] The inventors identified 303 miRNAs (142 verified, 161 predicted) with significant differential expression between normal bladder tissue samples and normal lymph nodes (log 2Diff bladder vs LN neg≧1 and p-value<0.05) (Table 19). Among the verified miRNAs, hsa-miR-205 and hsa-miR-187 had average expression levels that were more than 100-fold higher in bladder tissues; hsa-miR-429 and hsa-miR-133b had average expression levels that were more than 50-fold higher in bladder tissues; 21 miRNAs had average expression levels that were between 10- and 40-fold higher in bladder tissue samples; and 41 miRNAs had average expression levels that were between 5- and 10-fold higher in bladder tissue samples. Among the predicted miRNAs, hsa-asg-6845_st2 had an average expression level that was over 50-fold higher in bladder tissue samples; 11 miRNAs had average expression levels that were between 10- and 20-fold higher in bladder samples; and 43 miRNAs had average expression levels that were between 5- and 10-fold higher in bladder tissue samples.

TABLE 19
MicroRNAs Differentially Expressed Between Normal Bladder Samples (NBL) and Cancer-Negative Lymph Node
Samples (LNneg) from Patients.

| | Probe | NBL | | | | | | LNneg | | | | | | | | | | | | | | |
|---|---|---|---|---|---|---|---|---|---|---|---|---|---|---|---|---|---|---|---|---|---|---|
| MicroRNA | ID | 1 | 2 | 3 | M | SD | % | 1 | 2 | 3 | 4 | 5 | 6 | 7 | 8 | 9 | M | SD | % | ttest | log2 Diff | Fold |
| hsa-miR- | hsa-miR- | 12.9 | 12.5 | 13.30 | 12.9 | 0.36 | 100 | 2.93 | 5.91 | 5.64 | 2.03 | 3.59 | 6.11 | 3.40 | 5.32 | 7.76 | 4.74 | 1.85 | 33 | 2.3E−05 | 8.18 | 290 |
| 205 | 205_st1 | | | | | | | | | | | | | | | | | | | | | |
| hsa-miR- | hsa-miR- | 10.5 | 10.5 | 9.71 | 10.2 | 0.47 | 100 | 4.76 | 2.79 | 2.76 | 3.77 | 3.22 | 3.37 | 3.05 | 3.38 | 3.17 | 3.37 | 0.61 | 0 | 7.0E−09 | 6.89 | 118 |
| 187 | 187_st1 | | | | | | | | | | | | | | | | | | | | | |
| hsa-miR- | hsa-miR- | 8.66 | 7.84 | 9.75 | 8.75 | 0.96 | 100 | 3.45 | 1.54 | 3.67 | 2.13 | 2.37 | 2.69 | 2.32 | 2.45 | 5.39 | 2.89 | 1.14 | 0 | 1.2E−05 | 5.86 | 58.1 |
| 429 | 429_st1 | | | | | | | | | | | | | | | | | | | | | |
| hsa-miR- | hsa-miR- | 12.2 | 12.1 | 12.54 | 12.3 | 0.19 | 100 | 7.36 | 6.22 | 4.47 | 10.1 | 7.45 | 6.20 | 7.22 | 4.47 | 5.39 | 6.55 | 1.78 | 67 | 2.9E−04 | 5.78 | 55.0 |
| 133b | 133b_st2 | | | | | | | | | | | | | | | | | | | | | |
| hsa-asg- | hsa-asg- | 8.26 | 8.55 | 8.45 | 8.42 | 0.15 | 100 | 2.61 | 3.10 | 2.43 | 3.15 | 2.69 | 2.85 | 2.23 | 2.45 | 3.09 | 2.73 | 0.33 | 0 | 8.0E−11 | 5.69 | 51.5 |
| 6845 | 6845_st2 | | | | | | | | | | | | | | | | | | | | | |
| hsa-miR- | hsa-miR- | 12.8 | 12.7 | 13.05 | 12.8 | 0.14 | 100 | 7.77 | 7.70 | 5.92 | 10.8 | 8.19 | 7.14 | 8.22 | 6.25 | 6.48 | 7.61 | 1.47 | 89 | 1.2E−04 | 5.28 | 38.9 |
| 133a | 133a_st1 | | | | | | | | | | | | | | | | | | | | | |
| hsa-miR- | hsa-miR- | 11.9 | 11.1 | 12.46 | 11.8 | 0.68 | 100 | 7.33 | 5.89 | 7.21 | 8.24 | 6.45 | 5.41 | 5.19 | 6.07 | 9.36 | 6.79 | 1.37 | 78 | 1.4E−04 | 5.02 | 32.5 |
| 203 | 203_st2 | | | | | | | | | | | | | | | | | | | | | |
| hsa-miR- | hsa-miR- | 10.1 | 9.77 | 10.29 | 10.0 | 0.27 | 100 | 6.08 | 5.79 | 4.93 | 7.23 | 6.18 | 4.55 | 4.94 | 3.54 | 4.95 | 5.36 | 1.08 | 44 | 2.8E−05 | 4.70 | 26.1 |
| 189 | 189_st1 | | | | | | | | | | | | | | | | | | | | | |
| hsa-miR- | hsa-miR- | 8.72 | 9.00 | 9.81 | 9.17 | 0.57 | 100 | 5.85 | 2.16 | 4.54 | 5.96 | 4.89 | 4.10 | 4.07 | 4.35 | 4.67 | 4.51 | 1.12 | 22 | 4.7E−05 | 4.66 | 25.4 |
| 582 | 582_st1 | | | | | | | | | | | | | | | | | | | | | |
| hsa-miR- | hsa-miR- | 12.4 | 11.8 | 12.65 | 12.2 | 0.43 | 100 | 7.62 | 7.80 | 8.90 | 6.69 | 6.82 | 6.87 | 6.51 | 7.65 | 10.4 | 7.70 | 1.26 | 100 | 1.3E−04 | 4.59 | 24.2 |
| 200b | 200b_st1 | | | | | | | | | | | | | | | | | | | | | |
| hsa-miR- | hsa-miR- | 9.93 | 9.34 | 11.03 | 10.1 | 0.86 | 100 | 6.27 | 5.08 | 6.49 | 5.72 | 5.29 | 4.60 | 4.07 | 4.78 | 7.78 | 5.56 | 1.14 | 67 | 9.4E−05 | 4.54 | 23.2 |
| 200a | 200a_st2 | | | | | | | | | | | | | | | | | | | | | |
| hsa-miR- | hsa-miR- | 13.6 | 13.0 | 13.74 | 13.4 | 0.38 | 100 | 9.60 | 8.84 | 10.3 | 8.18 | 8.15 | 8.14 | 7.98 | 8.89 | 11.5 | 9.07 | 1.21 | 100 | 1.2E−04 | 4.42 | 21.3 |
| 200c | 200c_st1 | | | | | | | | | | | | | | | | | | | | | |
| hsa-asg- | hsa-asg- | 7.01 | 7.70 | 8.50 | 7.73 | 0.75 | 100 | 4.66 | 4.30 | 3.39 | 4.46 | 2.69 | 2.77 | 2.15 | 2.78 | 3.53 | 3.41 | 0.89 | 0 | 2.1E−05 | 4.32 | 20.0 |
| 924 | 924_st1 | | | | | | | | | | | | | | | | | | | | | |
| hsa-miR- | hsa-miR- | 7.95 | 8.29 | 7.87 | 8.04 | 0.22 | 100 | 4.85 | 3.74 | 4.54 | 5.23 | 5.56 | 2.99 | 3.40 | 2.27 | 2.10 | 3.85 | 1.27 | 11 | 2.5E−04 | 4.19 | 18.2 |
| 411 | 411_st1 | | | | | | | | | | | | | | | | | | | | | |
| hsa-miR- | hsa-miR- | 8.14 | 8.04 | 8.66 | 8.28 | 0.34 | 100 | 4.71 | 4.46 | 4.84 | 6.39 | 5.46 | 2.17 | 6.16 | 3.59 | 0.63 | 4.27 | 1.88 | 22 | 5.0E−03 | 4.01 | 16.2 |
| 378 | 378_st1 | | | | | | | | | | | | | | | | | | | | | |
| hsa-asg- | hsa-asg- | 7.34 | 5.46 | 7.42 | 6.74 | 1.11 | 67 | 3.07 | 2.26 | 3.06 | 3.01 | 2.37 | 2.69 | 1.16 | 2.78 | 4.40 | 2.75 | 0.86 | 0 | 6.5E−05 | 3.99 | 15.9 |
| 14153 | 14153_st2 | | | | | | | | | | | | | | | | | | | | | |
| hsa-asg- | hsa-asg- | 7.49 | 8.04 | 7.66 | 7.73 | 0.28 | 100 | 3.56 | 3.47 | 3.79 | 6.15 | 4.68 | 3.37 | 3.73 | 1.48 | 3.77 | 3.78 | 1.22 | 0 | 3.1E−04 | 3.95 | 15.5 |
| 5602 | 5602_st2 | | | | | | | | | | | | | | | | | | | | | |
| hsa-miR- | hsa-miR- | 8.16 | 8.81 | 8.74 | 8.57 | 0.35 | 100 | 4.37 | 3.83 | 6.88 | 6.18 | 6.33 | 3.69 | 4.38 | 1.88 | 4.60 | 4.68 | 1.56 | 33 | 2.0E−03 | 3.89 | 14.8 |
| 493-5p | 493-5p_st1 | | | | | | | | | | | | | | | | | | | | | |
| hsa-miR- | hsa-miR- | 10.0 | 10.3 | 10.01 | 10.1 | 0.21 | 100 | 6.49 | 6.52 | 7.70 | 8.08 | 7.70 | 5.24 | 5.64 | 3.99 | 5.09 | 6.27 | 1.39 | 67 | 9.2E−04 | 3.86 | 14.6 |
| 368 | 368_st2 | | | | | | | | | | | | | | | | | | | | | |
| hsa-miR- | hsa-miR- | 6.44 | 6.91 | 7.07 | 6.80 | 0.33 | 100 | 4.31 | 2.54 | 2.86 | 3.15 | 1.83 | 1.78 | 3.05 | 2.62 | 4.54 | 2.96 | 0.96 | 0 | 5.8E−05 | 3.84 | 14.3 |
| 592 | 592_st1 | | | | | | | | | | | | | | | | | | | | | |
| hsa-miR- | hsa-asg- | 6.40 | 6.90 | 6.81 | 6.70 | 0.26 | 100 | 3.07 | 3.29 | 3.67 | 1.72 | 1.64 | 2.69 | 3.05 | 1.68 | 5.42 | 2.92 | 1.21 | 11 | 3.8E−04 | 3.79 | 13.8 |
| 592 | 4400_st1 | | | | | | | | | | | | | | | | | | | | | |
| hsa-miR- | hsa-miR- | 6.62 | 5.89 | 6.57 | 6.36 | 0.41 | 100 | 2.61 | 2.16 | 3.06 | 0.75 | 1.74 | 2.17 | 2.92 | 3.07 | 4.47 | 2.55 | 1.03 | 0 | 1.2E−04 | 3.81 | 14.0 |
| 605 | 605_st1 | | | | | | | | | | | | | | | | | | | | | |
| hsa-miR- | hsa-miR- | 9.11 | 9.17 | 8.91 | 9.06 | 0.13 | 100 | 6.02 | 4.81 | 6.97 | 6.26 | 6.32 | 4.43 | 5.16 | 2.45 | 4.89 | 5.26 | 1.35 | 56 | 8.0E−04 | 3.81 | 14.0 |
| 495 | 495_st1 | | | | | | | | | | | | | | | | | | | | | |
| hsa-asg- | hsa-asg- | 7.55 | 7.43 | 8.26 | 7.74 | 0.45 | 100 | 3.56 | 3.53 | 1.66 | 5.23 | 4.47 | 4.24 | 4.27 | 4.21 | 4.54 | 3.97 | 1.01 | 0 | 1.0E−04 | 3.78 | 13.7 |
| 2027 | 2027_st1 | | | | | | | | | | | | | | | | | | | | | |
| hsa-miR- | hsa-miR- | 8.73 | 8.42 | 8.28 | 8.48 | 0.23 | 100 | 5.73 | 4.49 | 5.80 | 6.38 | 5.99 | 2.99 | 5.05 | 2.45 | 3.97 | 4.76 | 1.39 | 44 | 1.1E−03 | 3.71 | 13.1 |
| 299-5p | 299-5p_st2 | | | | | | | | | | | | | | | | | | | | | |
| hsa-asg- | hsa-asg- | 6.49 | 6.98 | 6.95 | 6.81 | 0.27 | 100 | 4.71 | 2.06 | 3.31 | 5.25 | 3.10 | 1.97 | 2.48 | 3.38 | 1.74 | 3.11 | 1.22 | 0 | 5.0E−04 | 3.70 | 13.0 |
| 10202 | 10202_st2 | | | | | | | | | | | | | | | | | | | | | |
| hsa-asg- | hsa-asg- | 8.57 | 8.37 | 8.08 | 8.34 | 0.24 | 100 | 5.18 | 4.43 | 6.99 | 6.06 | 5.91 | 3.54 | 4.59 | 3.07 | 2.10 | 4.65 | 1.57 | 22 | 2.8E−03 | 3.69 | 12.9 |
| 5021 | 5021_st1 | | | | | | | | | | | | | | | | | | | | | |
| hsa-miR- | hsa-miR- | 9.53 | 9.11 | 9.20 | 9.28 | 0.22 | 100 | 6.06 | 5.84 | 6.97 | 6.90 | 6.25 | 5.40 | 4.90 | 3.74 | 4.40 | 5.61 | 1.10 | 67 | 2.3E−04 | 3.67 | 12.8 |
| 487b | 487b_st2 | | | | | | | | | | | | | | | | | | | | | |
| hsa-asg- | hsa-asg- | 6.62 | 6.55 | 6.49 | 6.56 | 0.07 | 100 | 3.56 | 2.87 | 2.86 | 4.33 | 3.39 | 2.69 | 1.79 | 1.48 | 3.65 | 2.96 | 0.90 | 0 | 5.5E−05 | 3.60 | 12.1 |
| 3910 | 3910_st2 | | | | | | | | | | | | | | | | | | | | | |
| hsa-miR-31 | hsa-miR- | 12.5 | 12.6 | 13.15 | 12.8 | 0.31 | 100 | 10.4 | 9.79 | 8.95 | 10.1 | 8.71 | 8.60 | 7.73 | 8.68 | 10.1 | 9.23 | 0.91 | 100 | 7.2E−05 | 3.56 | 11.8 |
| | 31_st2 | | | | | | | | | | | | | | | | | | | | | |
| hsa-miR- | hsa-miR- | 6.76 | 7.22 | 7.16 | 7.04 | 0.25 | 100 | 3.76 | 2.54 | 4.30 | 4.36 | 4.91 | 3.13 | 3.17 | 1.29 | 3.97 | 3.49 | 1.10 | 0 | 3.1E−04 | 3.55 | 11.7 |
| 154 | 154_st2 | | | | | | | | | | | | | | | | | | | | | |
| hsa-asg- | hsa-asg- | 5.45 | 6.06 | 6.26 | 5.92 | 0.42 | 100 | 1.65 | 2.54 | 2.43 | 3.63 | 1.46 | 2.53 | 3.17 | 2.62 | 1.38 | 2.38 | 0.76 | 0 | 2.0E−05 | 3.54 | 11.7 |
| 2345 | 2345_st2 | | | | | | | | | | | | | | | | | | | | | |
| hsa-asg- | hsa-asg- | 8.58 | 8.44 | 8.27 | 8.43 | 0.15 | 100 | 5.60 | 5.37 | 6.65 | 5.89 | 5.90 | 4.03 | 4.73 | 2.45 | 3.39 | 4.89 | 1.36 | 56 | 1.4E−03 | 3.54 | 11.6 |
| 13254 | 13254_st1 | | | | | | | | | | | | | | | | | | | | | |
| hsa-miR- | hsa-miR- | 8.94 | 7.03 | 10.67 | 8.88 | 1.82 | 100 | 4.09 | 4.99 | 1.92 | 9.39 | 3.97 | 5.85 | 8.46 | 4.47 | 5.00 | 5.35 | 2.31 | 44 | 3.8E−02 | 3.53 | 11.6 |
| 206 | 206_st2 | | | | | | | | | | | | | | | | | | | | | |
| hsa-miR- | hsa-miR- | 6.27 | 6.86 | 6.78 | 6.64 | 0.32 | 100 | 2.78 | 2.36 | 4.21 | 3.40 | 4.21 | 2.99 | 3.50 | 1.29 | 3.25 | 3.11 | 0.91 | 0 | 8.0E−05 | 3.53 | 11.5 |
| 381 | 381_st2 | | | | | | | | | | | | | | | | | | | | | |
| hsa-asg- | hsa-asg- | 6.99 | 7.43 | 7.77 | 7.40 | 0.39 | 100 | 4.90 | 2.06 | 3.60 | 5.83 | 4.85 | 2.85 | 4.73 | 3.78 | 2.44 | 3.89 | 1.28 | 0 | 1.0E−03 | 3.50 | 11.3 |
| 13284 | 13284_st1 | | | | | | | | | | | | | | | | | | | | | |
| hsa-miR-376a | hsa-miR- | 7.80 | 8.05 | 7.48 | 7.78 | 0.28 | 100 | 5.14 | 4.08 | 5.49 | 5.67 | 4.85 | 4.03 | 2.48 | 3.83 | 3.77 | 4.37 | 1.01 | 0 | 2.3E−04 | 3.41 | 10.6 |
| | 376a_st2 | | | | | | | | | | | | | | | | | | | | | |
| hsa-miR- | hsa-asg- | 6.83 | 7.26 | 6.77 | 6.95 | 0.27 | 100 | 3.33 | 4.30 | 3.39 | 4.00 | 4.85 | 3.69 | 2.92 | 4.07 | 1.86 | 3.60 | 0.87 | 0 | 8.0E−05 | 3.35 | 10.2 |
| 376a | 14234_st1 | | | | | | | | | | | | | | | | | | | | | |
| hsa-miR- | hsa-asg- | 7.88 | 8.47 | 8.05 | 8.13 | 0.30 | 100 | 5.03 | 4.91 | 6.09 | 5.56 | 5.35 | 4.10 | 3.85 | 4.14 | 4.67 | 4.85 | 0.74 | 11 | 2.6E−05 | 3.28 | 9.7 |
| 376a | 10049_st1 | | | | | | | | | | | | | | | | | | | | | |
| hsa-asg- | hsa-asg- | 6.42 | 5.62 | 6.39 | 6.14 | 0.45 | 100 | 3.76 | 3.29 | 3.91 | 3.63 | 3.44 | 2.69 | 1.42 | 1.48 | 1.62 | 2.80 | 1.03 | 0 | 3.4E−04 | 3.34 | 10.1 |
| 5617 | 5617_st1 | | | | | | | | | | | | | | | | | | | | | |
| hsa-miR- | hsa-miR- | 10.1 | 10.2 | 10.41 | 10.2 | 0.15 | 100 | 9.10 | 7.83 | 4.98 | 9.74 | 8.82 | 7.06 | 6.80 | 3.64 | 4.89 | 6.99 | 2.11 | 67 | 2.7E−02 | 3.26 | 9.6 |
| 196b | 196b_st2 | | | | | | | | | | | | | | | | | | | | | |
| hsa-asg- | hsa-asg- | 4.46 | 4.62 | 6.69 | 5.25 | 1.25 | 33 | 2.25 | 3.02 | 1.66 | 2.03 | 2.19 | 2.44 | 0.48 | 1.48 | 2.54 | 2.01 | 0.74 | 0 | 2.1E−04 | 3.24 | 9.5 |
| 791 | 791_st1 | | | | | | | | | | | | | | | | | | | | | |
| hsa-miR- | hsa-miR- | 7.78 | 7.21 | 7.71 | 7.57 | 0.31 | 100 | 5.11 | 4.08 | 5.57 | 4.86 | 4.04 | 2.17 | 4.78 | 3.44 | 4.89 | 4.33 | 1.03 | 11 | 4.0E−04 | 3.24 | 9.4 |
| 338 | 338_st1 | | | | | | | | | | | | | | | | | | | | | |
| hsa-miR- | hsa-miR- | 8.52 | 8.91 | 9.41 | 8.95 | 0.45 | 100 | 5.80 | 6.16 | 5.53 | 5.92 | 5.78 | 3.48 | 5.82 | 5.72 | 7.23 | 5.72 | 0.97 | 89 | 2.8E−04 | 3.23 | 9.4 |
| 424 | 424_st1 | | | | | | | | | | | | | | | | | | | | | |
| hsa-miR-14205_st1 | hsa-asg- | 9.59 | 9.44 | 10.01 | 9.68 | 0.29 | 100 | 7.53 | 5.85 | 7.37 | 7.77 | 6.85 | 4.77 | 6.64 | 5.46 | 5.93 | 6.47 | 1.02 | 56 | 3.9E−04 | 3.22 | 9.3 |
| 331 | | | | | | | | | | | | | | | | | | | | | | |
| hsa-miR- | hsa-miR- | 10.7 | 10.7 | 11.16 | 10.8 | 0.25 | 100 | 9.04 | 7.57 | 8.35 | 8.79 | 7.69 | 7.09 | 7.70 | 7.28 | 7.20 | 7.86 | 0.71 | 100 | 3.5E−05 | 3.02 | 8.1 |
| 331 | 331_st2 | | | | | | | | | | | | | | | | | | | | | |
| hsa-asg- | hsa-asg- | 9.84 | 9.41 | 9.54 | 9.60 | 0.22 | 100 | 7.02 | 6.39 | 7.09 | 7.51 | 6.90 | 6.04 | 6.76 | 5.59 | 4.40 | 6.41 | 0.95 | 67 | 2.3E−04 | 3.19 | 9.1 |
| 13205 | 13205_st1 | | | | | | | | | | | | | | | | | | | | | |
| hsa-miR- | hsa-miR- | 9.59 | 9.93 | 9.62 | 9.72 | 0.19 | 100 | 6.81 | 5.57 | 7.95 | 7.53 | 7.69 | 5.72 | 6.59 | 5.49 | 5.44 | 6.53 | 1.02 | 56 | 3.9E−04 | 3.18 | 9.1 |
| 127 | 127_st1 | | | | | | | | | | | | | | | | | | | | | |
| hsa-asg- | hsa-asg- | 7.60 | 5.85 | 7.46 | 6.97 | 0.97 | 67 | 3.66 | 2.54 | 4.47 | 3.46 | 3.93 | 4.03 | 3.29 | 3.64 | 5.27 | 3.81 | 0.76 | 0 | 1.5E−04 | 3.16 | 9.0 |
| 7637 | 7637_st2 | | | | | | | | | | | | | | | | | | | | | |
| hsa-asg- | hsa-asg- | 5.97 | 5.59 | 5.96 | 5.84 | 0.22 | 100 | 2.78 | 1.54 | 2.43 | 3.91 | 2.83 | 2.85 | 1.79 | 3.54 | 2.54 | 2.69 | 0.75 | 0 | 3.8E−05 | 3.15 | 8.9 |
| 10393 | 10393_st1 | | | | | | | | | | | | | | | | | | | | | |
| hsa-asg- | hsa-asg- | 6.43 | 5.97 | 5.33 | 5.91 | 0.55 | 67 | 1.25 | 2.63 | 5.30 | 4.63 | 1.83 | 2.53 | 2.92 | 1.39 | 2.44 | 2.77 | 1.38 | 0 | 3.8E−03 | 3.14 | 8.8 |
| 14065 | 14065_st2 | | | | | | | | | | | | | | | | | | | | | |
| hsa-asg- | hsa-asg- | 6.38 | 6.17 | 6.52 | 6.36 | 0.18 | 100 | 3.33 | 3.16 | 3.54 | 2.51 | 2.53 | 3.26 | 2.64 | 3.20 | 5.09 | 3.25 | 0.78 | 0 | 6.1E−05 | 3.10 | 8.6 |
| 10131 | 10131_st2 | | | | | | | | | | | | | | | | | | | | | |
| hsa-asg-14172 | hsa-asg- | 7.08 | 7.19 | 7.50 | 7.26 | 0.22 | 100 | 5.07 | 2.71 | 4.47 | 5.45 | 4.81 | 2.77 | 3.59 | 3.74 | 5.18 | 4.20 | 1.03 | 0 | 5.9E−04 | 3.06 | 8.3 |
| | 14172_st1 | | | | | | | | | | | | | | | | | | | | | |
| hsa-miR- | hsa-miR- | 8.41 | 7.77 | 7.36 | 7.85 | 0.53 | 100 | 4.55 | 5.43 | 5.92 | 5.53 | 5.77 | 5.68 | 3.50 | 4.28 | 2.74 | 4.82 | 1.13 | 22 | 1.3E−03 | 3.03 | 8.1 |
| 432 | 432_st2 | | | | | | | | | | | | | | | | | | | | | |
| hsa-asg- | hsa-asg- | 5.14 | 4.21 | 5.45 | 4.93 | 0.64 | 33 | 1.85 | 2.36 | 2.18 | 1.51 | 2.11 | 1.78 | 0.62 | 1.48 | 3.39 | 1.92 | 0.75 | 0 | 1.0E−04 | 3.01 | 8.1 |
| 11715 | 11715_st2 | | | | | | | | | | | | | | | | | | | | | |
| hsa-miR- | hsa-miR- | 11.6 | 11.8 | 11.87 | 11.8 | 0.10 | 100 | 9.62 | 9.27 | 8.82 | 9.68 | 9.16 | 8.64 | 7.76 | 7.45 | 8.75 | 8.80 | 0.77 | 100 | 6.4E−05 | 3.01 | 8.0 |
| 218 | 218_st2 | | | | | | | | | | | | | | | | | | | | | |
| hsa-asg- | hsa-asg- | 7.71 | 7.44 | 7.31 | 7.49 | 0.20 | 100 | 5.62 | 5.68 | 2.96 | 5.39 | 5.57 | 4.03 | 3.59 | 2.70 | 4.81 | 4.48 | 1.19 | 11 | 1.7E−03 | 3.00 | 8.0 |
| 10391 | 10391_st2 | | | | | | | | | | | | | | | | | | | | | |
| hsa-asg- | hsa-asg- | 6.01 | 4.89 | 5.05 | 5.32 | 0.61 | 67 | 2.61 | 2.71 | 2.18 | 3.52 | 1.83 | 1.78 | 2.78 | 1.11 | 2.33 | 2.32 | 0.70 | 0 | 6.0E−05 | 3.00 | 8.0 |
| 12142 | 12142_st1 | | | | | | | | | | | | | | | | | | | | | |
| hsa-asg- | hsa-asg- | 5.90 | 5.08 | 5.61 | 5.53 | 0.42 | 67 | 2.78 | 2.16 | 4.02 | 1.72 | 2.19 | 2.35 | 0.35 | 3.20 | 3.97 | 2.53 | 1.14 | 0 | 1.4E−03 | 3.00 | 8.0 |
| 10247 | 10247_st1 | | | | | | | | | | | | | | | | | | | | | |
| hsa-miR- | hsa-miR- | 9.58 | 8.59 | 9.43 | 9.20 | 0.54 | 100 | 7.18 | 5.82 | 5.98 | 8.21 | 6.76 | 5.46 | 5.19 | 5.42 | 5.78 | 6.20 | 0.99 | 44 | 6.1E−04 | 3.00 | 8.0 |
| 204 | 204_st2 | | | | | | | | | | | | | | | | | | | | | |
| hsa-asg- | hsa-asg- | 8.73 | 8.61 | 8.63 | 8.66 | 0.07 | 100 | 5.60 | 5.72 | 5.67 | 6.74 | 5.70 | 5.30 | 5.25 | 5.00 | 6.09 | 5.68 | 0.51 | 56 | 2.0E−06 | 2.98 | 7.9 |
| 7471 | 7471_st1 | | | | | | | | | | | | | | | | | | | | | |
| hsa-asg- | hsa-asg- | 5.45 | 5.39 | 5.05 | 5.30 | 0.21 | 67 | 2.43 | 3.42 | 2.43 | 3.82 | 2.19 | 1.19 | 0.76 | 2.27 | 2.33 | 2.32 | 0.95 | 0 | 3.7E−04 | 2.98 | 7.9 |
| 6178 | 6178_st2 | | | | | | | | | | | | | | | | | | | | | |
| hsa-miR- | hsa-asg- | 11.2 | 10.8 | 11.31 | 11.1 | 0.24 | 100 | 8.22 | 8.12 | 8.48 | 8.62 | 7.79 | 8.03 | 7.78 | 8.78 | 8.07 | 8.21 | 0.35 | 100 | 1.0E−07 | 2.95 | 7.8 |
| 421 | 5033_st2 | | | | | | | | | | | | | | | | | | | | | |
| hsa-miR- | hsa-miR- | 12.0 | 11.5 | 12.04 | 11.8 | 0.26 | 100 | 9.50 | 9.20 | 8.98 | 9.42 | 8.71 | 8.84 | 8.37 | 9.39 | 8.91 | 9.04 | 0.37 | 100 | 2.8E−07 | 2.84 | 7.2 |
| 421 | 421-3p_st1 | | | | | | | | | | | | | | | | | | | | | |
| hsa-asg- | hsa-asg- | 5.22 | 4.62 | 5.91 | 5.25 | 0.65 | 33 | 1.25 | 1.05 | 3.85 | 1.82 | 0.94 | 2.35 | 1.60 | 3.38 | 4.50 | 2.31 | 1.31 | 0 | 4.3E−03 | 2.94 | 7.7 |
| 11088 | 11088_st1 | | | | | | | | | | | | | | | | | | | | | |
| hsa-miR- | hsa-miR- | 7.86 | 8.56 | 8.89 | 8.43 | 0.52 | 100 | 7.18 | 6.53 | 4.21 | 5.98 | 6.52 | 4.70 | 4.86 | 4.35 | 5.09 | 5.49 | 1.08 | 44 | 1.2E−03 | 2.94 | 7.7 |
| 101 | 101_st1 | | | | | | | | | | | | | | | | | | | | | |
| hsa-miR- | hsa-asg- | 6.18 | 5.82 | 6.36 | 6.12 | 0.28 | 100 | 1.65 | 3.16 | 3.79 | 3.73 | 4.42 | 2.35 | 3.68 | 2.78 | 3.09 | 3.18 | 0.84 | 0 | 1.8E−04 | 2.94 | 7.7 |
| 329 | 13589_st2 | | | | | | | | | | | | | | | | | | | | | |
| hsa-miR- | hsa-miR- | 6.59 | 6.30 | 7.26 | 6.72 | 0.49 | 100 | 4.24 | 2.71 | 2.86 | 3.91 | 3.63 | 4.03 | 4.20 | 4.47 | 4.07 | 3.79 | 0.61 | 0 | 2.2E−05 | 2.93 | 7.6 |
| 450 | 450_st2 | | | | | | | | | | | | | | | | | | | | | |
| hsa-miR- | hsa-asg- | 5.82 | 4.98 | 5.78 | 5.53 | 0.47 | 67 | 3.56 | 2.16 | 2.43 | 3.01 | 2.53 | 3.13 | 2.92 | 2.93 | 2.74 | 2.82 | 0.41 | 0 | 2.5E−06 | 2.71 | 6.5 |
| 450 | 14228_st2 | | | | | | | | | | | | | | | | | | | | | |
| hsa-asg- | hsa-asg- | 9.57 | 9.07 | 9.41 | 9.35 | 0.26 | 100 | 7.05 | 6.35 | 7.01 | 7.73 | 6.67 | 5.80 | 5.79 | 5.15 | 6.39 | 6.44 | 0.78 | 11 | 1.0E−04 | 2.91 | 7.5 |
| 14150 | 14150_st1 | | | | | | | | | | | | | | | | | | | | | |
| hsa-asg- | hsa-asg- | 5.31 | 4.68 | 5.54 | 5.18 | 0.45 | 67 | 1.65 | 0.95 | 3.79 | 2.33 | 2.69 | 2.35 | 0.35 | 3.20 | 3.25 | 2.29 | 1.12 | 0 | 1.7E−03 | 2.89 | 7.4 |
| 13705 | 13705_st1 | | | | | | | | | | | | | | | | | | | | | |
| hsa-asg- | hsa-asg- | 6.36 | 5.46 | 5.85 | 5.89 | 0.45 | 33 | 2.61 | 2.45 | 3.14 | 4.86 | 4.45 | 1.29 | 2.48 | 2.17 | 3.59 | 3.00 | 1.13 | 0 | 1.8E−03 | 2.88 | 7.4 |
| 7469 | 7469_st1 | | | | | | | | | | | | | | | | | | | | | |
| hsa-asg- | hsa-asg- | 4.99 | 3.76 | 5.32 | 4.69 | 0.82 | 33 | 2.25 | 1.96 | 2.66 | 2.03 | 2.53 | 1.01 | 0.02 | 2.17 | 1.62 | 1.80 | 0.83 | 0 | 3.9E−04 | 2.88 | 7.4 |
| 8428 | 8428_st2 | | | | | | | | | | | | | | | | | | | | | |
| hsa-miR- | hsa-miR- | 6.92 | 6.06 | 8.24 | 7.07 | 1.10 | 100 | 5.07 | 3.83 | 4.93 | 4.43 | 4.39 | 2.85 | 3.85 | 3.83 | 4.54 | 4.19 | 0.68 | 0 | 2.5E−04 | 2.88 | 7.4 |
| 141 | 141_st1 | | | | | | | | | | | | | | | | | | | | | |
| hsa-miR- | hsa-miR- | 7.35 | 6.85 | 5.75 | 6.65 | 0.82 | 33 | 2.25 | 3.47 | 5.14 | 4.99 | 4.77 | 2.99 | 3.96 | 2.62 | 3.77 | 3.77 | 1.05 | 0 | 1.5E−03 | 2.88 | 7.3 |
| 409-3p | 409-3p_st1 | | | | | | | | | | | | | | | | | | | | | |
| hsa-asg- | hsa-asg- | 6.89 | 6.99 | 6.66 | 6.85 | 0.17 | 100 | 4.49 | 3.42 | 4.87 | 4.95 | 4.11 | 4.18 | 3.59 | 2.08 | 4.07 | 3.97 | 0.88 | 0 | 2.7E−04 | 2.88 | 7.3 |
| 13166 | 13166_st2 | | | | | | | | | | | | | | | | | | | | | |
| hsa-asg- | hsa-asg- | 8.22 | 7.74 | 8.06 | 8.01 | 0.25 | 100 | 5.62 | 5.67 | 5.24 | 4.91 | 4.79 | 4.75 | 5.16 | 4.47 | 5.60 | 5.13 | 0.43 | 22 | 8.7E−07 | 2.88 | 7.3 |
| 13135 | 13135_st1 | | | | | | | | | | | | | | | | | | | | | |
| hsa-asg- | hsa-asg- | 12.0 | 12.2 | 11.84 | 12.0 | 0.19 | 100 | 10.9 | 9.01 | 9.13 | 11.2 | 9.75 | 8.53 | 10.2 | 8.11 | 5.85 | 9.20 | 1.64 | 100 | 1.5E−02 | 2.84 | 7.2 |
| 8878 | 8878_st2 | | | | | | | | | | | | | | | | | | | | | |
| hsa-miR- | hsa-cand708_st1 | 7.74 | 7.45 | 7.86 | 7.69 | 0.21 | 100 | 5.94 | 5.23 | 4.02 | 6.58 | 5.46 | 4.24 | 5.64 | 3.07 | 3.53 | 4.86 | 1.19 | 44 | 2.6E−03 | 2.83 | 7.1 |
| 365 | | | | | | | | | | | | | | | | | | | | | | |
| hsa-miR- | hsa-miR- | 8.47 | 8.53 | 8.67 | 8.56 | 0.10 | 100 | 7.27 | 5.64 | 5.53 | 7.63 | 6.38 | 5.40 | 6.66 | 4.78 | 4.78 | 6.01 | 1.03 | 56 | 2.0E−03 | 2.55 | 5.8 |
| 365 | 365_st1 | | | | | | | | | | | | | | | | | | | | | |
| hsa-miR- | hsa-asg- | 8.32 | 8.38 | 8.49 | 8.40 | 0.09 | 100 | 7.33 | 5.87 | 6.09 | 7.37 | 6.38 | 5.46 | 6.63 | 4.78 | 4.67 | 6.06 | 0.98 | 56 | 2.6E−03 | 2.33 | 5.0 |
| 365 | 13156_st1 | | | | | | | | | | | | | | | | | | | | | |
| hsa-miR- | hsa-miR- | 6.49 | 6.39 | 7.09 | 6.66 | 0.38 | 100 | 3.93 | 2.87 | 3.67 | 3.63 | 3.85 | 2.85 | 3.85 | 4.68 | 5.18 | 3.84 | 0.75 | 0 | 1.1E−04 | 2.82 | 7.1 |
| 542-5p | 542-5p_st2 | | | | | | | | | | | | | | | | | | | | | |
| hsa-asg- | hsa-asg- | 5.97 | 5.35 | 5.38 | 5.57 | 0.35 | 100 | 3.33 | 3.02 | 2.18 | 3.57 | 2.53 | 2.17 | 2.92 | 3.13 | 1.86 | 2.75 | 0.59 | 0 | 1.6E−05 | 2.82 | 7.1 |
| 1826 | 1826_st2 | | | | | | | | | | | | | | | | | | | | | |
| hsa-miR- | hsa-miR- | 6.05 | 5.82 | 5.79 | 5.88 | 0.14 | 33 | 4.49 | 3.87 | 1.79 | 4.15 | 2.76 | 1.48 | 2.48 | 3.38 | 3.17 | 3.07 | 1.03 | 0 | 1.0E−03 | 2.82 | 7.0 |
| 149 | 149_st2 | | | | | | | | | | | | | | | | | | | | | |
| hsa-miR- | hsa-miR- | 5.82 | 5.28 | 4.98 | 5.36 | 0.43 | 33 | 2.05 | 3.16 | 2.66 | 3.40 | 2.69 | 2.99 | 1.97 | 2.62 | 1.38 | 2.55 | 0.64 | 0 | 3.8E−05 | 2.81 | 7.0 |
| 539 | 539_st1 | | | | | | | | | | | | | | | | | | | | | |
| hsa-miR- | hsa-miR- | 6.17 | 7.15 | 7.60 | 6.97 | 0.73 | 100 | 4.81 | 4.86 | 4.87 | 4.76 | 4.00 | 2.69 | 4.14 | 2.93 | 4.40 | 4.16 | 0.83 | 0 | 4.0E−04 | 2.81 | 7.0 |
| 551b | 551b_st1 | | | | | | | | | | | | | | | | | | | | | |
| hsa-miR- | hsa- | 6.43 | 6.96 | 7.59 | 6.99 | 0.58 | 100 | 5.25 | 4.43 | 3.79 | 5.85 | 3.39 | 4.03 | 4.82 | 3.54 | 4.32 | 4.38 | 0.81 | 22 | 4.7E−04 | 2.61 | 6.1 |
| 551b | miR167_st2 | | | | | | | | | | | | | | | | | | | | | |
| hsa-miR- | hsa-miR- | 6.10 | 6.10 | 6.55 | 6.25 | 0.26 | 100 | 3.56 | 2.71 | 4.47 | 4.36 | 4.36 | 2.53 | 2.92 | 2.62 | 3.53 | 3.45 | 0.80 | 0 | 1.6E−04 | 2.80 | 7.0 |
| 369-5p | 369-5p_st2 | | | | | | | | | | | | | | | | | | | | | |
| hsa-miR- | hsa-asg- | 6.56 | 6.17 | 5.82 | 6.18 | 0.37 | 100 | 3.76 | 3.42 | 4.02 | 2.23 | 3.72 | 3.73 | 3.40 | 2.78 | 3.53 | 3.40 | 0.56 | 0 | 1.2E−05 | 2.78 | 6.9 |
| 369-5p | 1521_st1 | | | | | | | | | | | | | | | | | | | | | |
| hsa-cand26 | hsa-cand26_st2 | 8.22 | 7.35 | 7.75 | 7.77 | 0.44 | 100 | 6.12 | 5.61 | 6.03 | 4.08 | 3.68 | 4.75 | 5.29 | 4.07 | 5.46 | 5.01 | 0.90 | 22 | 5.4E−04 | 2.76 | 6.8 |
| hsa-asg- | hsa-asg- | 6.24 | 5.68 | 6.16 | 6.03 | 0.30 | 100 | 3.07 | 2.54 | 4.81 | 2.42 | 2.53 | 2.77 | 3.17 | 3.91 | 4.16 | 3.27 | 0.84 | 0 | 2.9E−04 | 2.76 | 6.8 |
| 1296 | 1296_st1 | | | | | | | | | | | | | | | | | | | | | |
| hsa-asg- | hsa-asg- | 5.89 | 6.14 | 5.24 | 5.76 | 0.47 | 100 | 3.76 | 2.87 | 2.66 | 3.40 | 3.49 | 2.85 | 2.92 | 2.93 | 2.10 | 3.00 | 0.49 | 0 | 7.1E−06 | 2.76 | 6.8 |
| 12690 | 12690_st1 | | | | | | | | | | | | | | | | | | | | | |
| hsa-miR- | hsa-miR- | 5.38 | 6.01 | 6.16 | 5.85 | 0.41 | 67 | 4.09 | 2.87 | 3.79 | 2.77 | 2.19 | 3.54 | 3.68 | 2.62 | 2.33 | 3.10 | 0.69 | 0 | 7.7E−05 | 2.75 | 6.7 |
| 641 | 641_st1 | | | | | | | | | | | | | | | | | | | | | |
| hsa- | hsa- | 4.32 | 4.89 | 6.26 | 5.16 | 0.99 | 33 | 3.45 | 2.71 | 1.66 | 3.15 | 1.11 | 1.58 | 3.77 | 1.88 | 2.54 | 2.43 | 0.92 | 0 | 1.4E−03 | 2.73 | 6.6 |
| cand317 | cand317_st1 | | | | | | | | | | | | | | | | | | | | | |
| hsa-miR- | hsa- | 6.27 | 6.67 | 5.81 | 6.25 | 0.43 | 100 | 3.93 | 2.54 | 1.92 | 5.43 | 5.30 | 2.53 | 3.17 | 3.20 | 3.65 | 3.52 | 1.21 | 0 | 3.9E−03 | 2.73 | 6.6 |
| 193a | cand178_st1 | | | | | | | | | | | | | | | | | | | | | |
| hsa-asg-3822 | hsa-asg- | 5.63 | 5.18 | 5.56 | 5.46 | 0.24 | 33 | 2.05 | 3.02 | 3.67 | 2.03 | 2.45 | 2.17 | 1.60 | 2.93 | 4.78 | 2.75 | 0.99 | 0 | 1.0E−03 | 2.71 | 6.6 |
| | 3822_st2 | | | | | | | | | | | | | | | | | | | | | |
| hsa-miR- | hsa-miR- | 5.24 | 4.13 | 5.73 | 5.03 | 0.82 | 67 | 2.25 | 2.87 | 3.06 | 1.72 | 2.01 | 1.97 | 1.97 | 2.08 | 3.09 | 2.34 | 0.53 | 0 | 4.8E−05 | 2.70 | 6.5 |
| 576 | 576_st2 | | | | | | | | | | | | | | | | | | | | | |
| hsa-cand206 | hsa-cand206_st1 | 5.82 | 4.89 | 5.40 | 5.37 | 0.47 | 67 | 2.25 | 1.96 | 3.79 | 3.63 | 2.69 | 2.17 | 3.59 | 1.29 | 2.74 | 2.68 | 0.86 | 0 | 4.7E−04 | 2.69 | 6.5 |
| hsa-miR- | hsa-miR- | 9.44 | 9.18 | 9.21 | 9.28 | 0.15 | 100 | 6.52 | 6.42 | 7.11 | 6.97 | 7.04 | 6.59 | 6.35 | 6.14 | 6.23 | 6.60 | 0.36 | 100 | 2.4E−07 | 2.68 | 6.4 |
| 379 | 379_st1 | | | | | | | | | | | | | | | | | | | | | |
| hsa-miR-1 | hsa-miR- | 12.6 | 12.7 | 12.60 | 12.6 | 0.07 | 100 | 11.0 | 10.8 | 8.18 | 11.7 | 10.7 | 10.0 | 10.1 | 7.66 | 9.47 | 9.99 | 1.35 | 100 | 7.8E−03 | 2.68 | 6.4 |
| | 1_st1 | | | | | | | | | | | | | | | | | | | | | |
| hsa-miR-200a* | hsa-miR- | 5.53 | 4.73 | 5.97 | 5.41 | 0.63 | 67 | 3.07 | 2.87 | 2.18 | 3.91 | 2.61 | 1.78 | 2.15 | 3.20 | 2.92 | 2.74 | 0.65 | 0 | 9.9E−05 | 2.67 | 6.3 |
| | 200a-_st2 | | | | | | | | | | | | | | | | | | | | | |
| hsa-miR- | hsa- | 7.35 | 7.30 | 8.03 | 7.56 | 0.41 | 100 | 5.45 | 4.81 | 5.37 | 6.66 | 4.11 | 4.43 | 4.82 | 4.58 | 3.87 | 4.90 | 0.84 | 22 | 4.2E−04 | 2.66 | 6.3 |
| 499 | miR12_st1 | | | | | | | | | | | | | | | | | | | | | |
| hsa-miR- | hsa-miR- | 6.79 | 6.91 | 7.84 | 7.18 | 0.58 | 100 | 5.32 | 4.66 | 4.75 | 6.58 | 4.53 | 4.18 | 5.05 | 4.28 | 4.60 | 4.88 | 0.73 | 22 | 6.0E−04 | 2.30 | 4.9 |
| 499 | 499_st1 | | | | | | | | | | | | | | | | | | | | | |
| hsa-miR- | hsa-miR- | 5.28 | 5.16 | 6.05 | 5.50 | 0.49 | 67 | 4.61 | 3.42 | 2.86 | 3.15 | 3.63 | 2.53 | 1.60 | 1.29 | 2.54 | 2.85 | 1.02 | 0 | 1.7E−03 | 2.65 | 6.3 |
| 19a | 19a_st1 | | | | | | | | | | | | | | | | | | | | | |
| hsa-miR- | hsa-miR- | 6.16 | 6.28 | 5.80 | 6.08 | 0.25 | 100 | 3.76 | 3.02 | 4.61 | 3.28 | 4.58 | 2.85 | 2.78 | 3.32 | 2.74 | 3.44 | 0.73 | 0 | 1.3E−04 | 2.64 | 6.2 |
| 329 | 329_st1 | | | | | | | | | | | | | | | | | | | | | |
| hsa-miR- | hsa-asg- | 6.20 | 6.19 | 6.18 | 6.19 | 0.01 | 100 | 4.09 | 2.87 | 4.21 | 3.40 | 4.24 | 3.48 | 4.00 | 2.62 | 3.53 | 3.61 | 0.59 | 0 | 2.3E−05 | 2.58 | 6.0 |
| 329 | 13204_st2 | | | | | | | | | | | | | | | | | | | | | |
| hsa-asg- | hsa-asg- | 4.97 | 4.94 | 5.45 | 5.12 | 0.29 | 33 | 3.33 | 2.71 | 1.92 | 2.33 | 3.16 | 2.35 | 2.64 | 1.88 | 2.10 | 2.49 | 0.51 | 0 | 9.0E−06 | 2.63 | 6.2 |
| 9253 | 9253_st2 | | | | | | | | | | | | | | | | | | | | | |
| hsa-miR- | hsa-miR- | 11.5 | 11.7 | 11.59 | 11.6 | 0.12 | 100 | 9.40 | 9.08 | 9.04 | 10.6 | 10.3 | 8.25 | 9.05 | 6.55 | 8.85 | 9.03 | 1.19 | 100 | 4.2E−03 | 2.62 | 6.1 |
| 199b | 199b_st2 | | | | | | | | | | | | | | | | | | | | | |
| hsa-asg- | hsa-asg- | 9.17 | 8.72 | 9.39 | 9.10 | 0.34 | 100 | 7.43 | 6.36 | 6.67 | 7.04 | 6.26 | 6.27 | 6.63 | 6.55 | 5.09 | 6.48 | 0.64 | 89 | 6.1E−05 | 2.62 | 6.1 |
| 9696 | 9696_st1 | | | | | | | | | | | | | | | | | | | | | |
| hsa-miR- | hsa-miR- | 9.15 | 8.87 | 9.73 | 9.25 | 0.44 | 100 | 6.89 | 7.22 | 7.37 | 6.61 | 6.11 | 6.50 | 6.41 | 6.62 | 6.01 | 6.64 | 0.46 | 78 | 6.2E−06 | 2.61 | 6.1 |
| 503 | 503_st1 | | | | | | | | | | | | | | | | | | | | | |
| hsa-miR- | hsa- | 9.02 | 8.66 | 9.60 | 9.09 | 0.47 | 100 | 7.11 | 7.33 | 7.30 | 6.52 | 6.57 | 6.68 | 6.86 | 6.89 | 6.76 | 6.89 | 0.30 | 100 | 2.0E−06 | 2.20 | 4.6 |
| 503 | miR141_st1 | | | | | | | | | | | | | | | | | | | | | |
| hsa-asg- | hsa-asg- | 8.91 | 8.60 | 8.71 | 8.74 | 0.15 | 100 | 7.46 | 6.04 | 7.10 | 7.36 | 4.72 | 5.57 | 6.22 | 7.09 | 3.77 | 6.15 | 1.28 | 78 | 6.7E−03 | 2.59 | 6.0 |
| 13230 | 13230_st2 | | | | | | | | | | | | | | | | | | | | | |
| hsa-asg- | hsa-asg- | 11.2 | 11.2 | 11.57 | 11.3 | 0.20 | 100 | 8.63 | 8.58 | 8.70 | 9.41 | 8.77 | 8.37 | 9.21 | 8.76 | 8.49 | 8.77 | 0.34 | 100 | 2.4E−07 | 2.57 | 5.9 |
| 3998 | 3998_st1 | | | | | | | | | | | | | | | | | | | | | |
| hsa-miR- | hsa-miR- | 8.28 | 7.67 | 8.63 | 8.19 | 0.49 | 100 | 6.71 | 5.98 | 5.89 | 6.87 | 5.97 | 5.59 | 5.59 | 3.07 | 5.05 | 5.64 | 1.11 | 56 | 3.7E−03 | 2.56 | 5.9 |
| 598 | 598_st2 | | | | | | | | | | | | | | | | | | | | | |
| hsa-asg- | hsa-asg- | 8.34 | 7.89 | 7.90 | 8.04 | 0.26 | 100 | 6.06 | 5.72 | 5.28 | 6.77 | 6.26 | 5.43 | 5.46 | 4.21 | 4.16 | 5.48 | 0.87 | 44 | 6.5E−04 | 2.56 | 5.9 |
| 14176 | 14176_st1 | | | | | | | | | | | | | | | | | | | | | |
| hsa-asg- | hsa-asg- | 5.20 | 4.73 | 4.78 | 4.90 | 0.26 | 33 | 2.78 | 2.36 | 2.66 | 2.33 | 1.64 | 2.17 | 1.60 | 2.08 | 3.53 | 2.35 | 0.59 | 0 | 3.5E−05 | 2.55 | 5.9 |
| 12139 | 12139_st2 | | | | | | | | | | | | | | | | | | | | | |
| hsa-miR-9* | hsa-miR-9-_st2 | 8.31 | 7.86 | 8.19 | 8.12 | 0.23 | 100 | 6.20 | 6.10 | 5.57 | 6.11 | 5.41 | 5.87 | 4.94 | 4.73 | 5.23 | 5.57 | 0.54 | 44 | 1.4E−05 | 2.55 | 5.9 |
| hsa-miR-9 | hsa-miR- | 6.18 | 5.65 | 5.78 | 5.87 | 0.28 | 100 | 3.45 | 3.53 | 2.86 | 3.28 | 3.63 | 2.17 | 3.50 | 3.32 | 4.16 | 3.32 | 0.55 | 0 | 2.0E−05 | 2.55 | 5.8 |
| | 9_st2 | | | | | | | | | | | | | | | | | | | | | |
| hsa-asg- | hsa-asg- | 7.03 | 6.99 | 7.44 | 7.16 | 0.25 | 100 | 4.85 | 4.76 | 4.54 | 5.12 | 4.55 | 4.18 | 4.98 | 4.35 | 4.16 | 4.61 | 0.34 | 0 | 3.8E−07 | 2.55 | 5.8 |
| 128 | 128_st2 | | | | | | | | | | | | | | | | | | | | | |
| hsa-asg- | hsa-asg- | 5.28 | 4.79 | 5.32 | 5.13 | 0.30 | 67 | 2.25 | 2.16 | 2.86 | 3.63 | 2.37 | 2.35 | 3.29 | 2.27 | 2.10 | 2.59 | 0.55 | 0 | 2.0E−05 | 2.54 | 5.8 |
| 1765 | 1765_st1 | | | | | | | | | | | | | | | | | | | | | |
| hsa-miR- | hsa-miR- | 5.60 | 5.20 | 4.38 | 5.06 | 0.62 | 33 | 2.25 | 2.87 | 2.66 | 3.40 | 2.19 | 3.26 | 0.91 | 2.27 | 2.92 | 2.53 | 0.75 | 0 | 3.6E−04 | 2.54 | 5.8 |
| 487a | 487a_st2 | | | | | | | | | | | | | | | | | | | | | |
| hsa-miR- | hsa-asg- | 6.31 | 5.56 | 5.12 | 5.66 | 0.60 | 100 | 4.09 | 3.64 | 3.91 | 3.40 | 3.89 | 3.78 | 3.68 | 3.74 | 3.65 | 3.75 | 0.20 | 0 | 4.5E−06 | 1.91 | 3.8 |
| 487a | 6915_st1 | | | | | | | | | | | | | | | | | | | | | |
| hsa-asg- | hsa-asg- | 11.8 | 11.8 | 12.16 | 11.9 | 0.18 | 100 | 10.5 | 9.46 | 9.58 | 9.81 | 9.17 | 8.63 | 9.51 | 8.96 | 9.11 | 9.43 | 0.56 | 100 | 2.1E−05 | 2.52 | 5.8 |
| 13308 | 13308_st2 | | | | | | | | | | | | | | | | | | | | | |
| hsa-miR- | hsa-miR- | 11.7 | 11.5 | 11.84 | 11.7 | 0.14 | 100 | 9.10 | 9.02 | 9.17 | 9.80 | 8.98 | 8.85 | 9.69 | 9.24 | 9.14 | 9.22 | 0.32 | 100 | 1.6E−07 | 2.49 | 5.6 |
| 422a | 422a_st1 | | | | | | | | | | | | | | | | | | | | | |
| hsa-asg- | hsa-asg- | 11.9 | 11.8 | 12.23 | 12.0 | 0.18 | 100 | 10.6 | 9.48 | 9.75 | 10.1 | 9.40 | 8.81 | 9.58 | 9.07 | 9.15 | 9.56 | 0.56 | 100 | 2.4E−05 | 2.47 | 5.6 |
| 5304 | 5304_st1 | | | | | | | | | | | | | | | | | | | | | |
| hsa-miR- | hsa-miR- | 11.5 | 11.5 | 11.47 | 11.5 | 0.05 | 100 | 9.49 | 8.88 | 8.87 | 10.3 | 10.1 | 8.31 | 9.92 | 7.23 | 8.38 | 9.07 | 1.01 | 100 | 2.2E−03 | 2.46 | 5.5 |
| 193b | 193b_st1 | | | | | | | | | | | | | | | | | | | | | |
| hsa-asg-10881 | hsa-asg- | 7.84 | 7.29 | 7.80 | 7.64 | 0.31 | 100 | 5.73 | 5.04 | 6.06 | 5.43 | 4.79 | 5.46 | 4.20 | 5.04 | 5.23 | 5.22 | 0.54 | 22 | 2.8E−05 | 2.42 | 5.4 |
| | 10881_st1 | | | | | | | | | | | | | | | | | | | | | |
| hsa-asg- | hsa-asg- | 5.48 | 5.62 | 6.42 | 5.84 | 0.51 | 100 | 2.78 | 3.53 | 3.39 | 3.28 | 3.63 | 3.37 | 3.85 | 2.62 | 4.32 | 3.42 | 0.52 | 0 | 3.4E−05 | 2.42 | 5.4 |
| 11361 | 11361_st2 | | | | | | | | | | | | | | | | | | | | | |
| hsa-miR- | hsa-miR- | 11.6 | 11.1 | 11.49 | 11.4 | 0.26 | 100 | 9.35 | 8.42 | 9.39 | 10.2 | 9.96 | 8.12 | 9.20 | 8.06 | 8.47 | 9.02 | 0.80 | 100 | 5.2E−04 | 2.41 | 5.3 |
| 574 | 574_st1 | | | | | | | | | | | | | | | | | | | | | |
| hsa-miR- | hsa-miR- | 11.0 | 10.7 | 10.40 | 10.7 | 0.31 | 100 | 9.72 | 8.56 | 8.33 | 8.35 | 8.59 | 8.08 | 8.02 | 8.44 | 6.88 | 8.33 | 0.74 | 89 | 3.1E−04 | 2.40 | 5.3 |
| 132 | 132_st1 | | | | | | | | | | | | | | | | | | | | | |
| hsa-asg- | hsa-asg- | 4.90 | 4.56 | 5.32 | 4.92 | 0.38 | 33 | 2.43 | 2.71 | 1.92 | 1.93 | 2.01 | 2.53 | 2.92 | 2.62 | 3.65 | 2.53 | 0.55 | 0 | 4.3E−05 | 2.40 | 5.3 |
| 5119 | 5119_st1 | | | | | | | | | | | | | | | | | | | | | |
| hsa-miR- | hsa-miR- | 5.81 | 5.03 | 5.77 | 5.54 | 0.44 | 67 | 4.49 | 2.36 | 3.67 | 3.52 | 3.68 | 2.85 | 1.60 | 3.32 | 2.92 | 3.16 | 0.84 | 0 | 1.0E−03 | 2.38 | 5.2 |
| 589 | 589_st1 | | | | | | | | | | | | | | | | | | | | | |
| hsa-miR- | hsa-asg- | 5.51 | 5.75 | 5.73 | 5.66 | 0.13 | 33 | 4.99 | 3.92 | 2.86 | 5.14 | 4.60 | 2.99 | 4.00 | 3.64 | 3.77 | 3.99 | 0.80 | 0 | 5.7E−03 | 1.67 | 3.2 |
| 589 | 9674_st1 | | | | | | | | | | | | | | | | | | | | | |
| hsa-asg- | hsa-asg- | 6.31 | 5.87 | 6.71 | 6.29 | 0.42 | 100 | 5.18 | 4.49 | 4.02 | 1.72 | 3.39 | 2.85 | 3.85 | 5.08 | 4.67 | 3.92 | 1.12 | 11 | 5.8E−03 | 2.38 | 5.2 |
| 9980 | 9980_st1 | | | | | | | | | | | | | | | | | | | | | |
| hsa-miR- | hsa-miR- | 7.12 | 6.59 | 7.48 | 7.07 | 0.45 | 100 | 5.83 | 4.99 | 5.24 | 5.71 | 4.89 | 4.46 | 4.49 | 3.99 | 2.74 | 4.71 | 0.94 | 11 | 2.2E−03 | 2.36 | 5.1 |
| 340 | 340_st1 | | | | | | | | | | | | | | | | | | | | | |
| hsa-asg- | hsa-asg- | 7.04 | 7.17 | 7.06 | 7.09 | 0.07 | 100 | 5.92 | 4.49 | 5.04 | 6.08 | 5.09 | 4.87 | 4.14 | 2.93 | 4.07 | 4.73 | 0.97 | 22 | 2.2E−03 | 2.35 | 5.1 |
| 8411 | 8411_st2 | | | | | | | | | | | | | | | | | | | | | |
| hsa-miR- | hsa-miR- | 13.0 | 13.0 | 13.06 | 13.0 | 0.02 | 100 | 10.6 | 10.5 | 10.7 | 11.3 | 10.7 | 10.3 | 10.9 | 10.7 | 10.5 | 10.7 | 0.27 | 100 | 5.1E−08 | 2.33 | 5.0 |
| 422b | 422b_st2 | | | | | | | | | | | | | | | | | | | | | |
| hsa-asg-10883 | hsa-asg- | 9.37 | 9.49 | 9.46 | 9.44 | 0.07 | 100 | 7.64 | 7.18 | 7.34 | 8.22 | 8.03 | 6.58 | 6.97 | 5.74 | 6.63 | 7.15 | 0.78 | 89 | 5.8E−04 | 2.29 | 4.9 |
| | 10883_st1 | | | | | | | | | | | | | | | | | | | | | |
| hsa-miR- | hsa-miR- | 5.12 | 6.41 | 6.69 | 6.07 | 0.84 | 67 | 4.76 | 4.66 | 3.39 | 5.42 | 4.97 | 2.92 | 2.32 | 2.27 | 3.39 | 3.79 | 1.19 | 0 | 1.2E−02 | 2.28 | 4.9 |
| 452* | 452-_st1 | | | | | | | | | | | | | | | | | | | | | |
| hsa-asg- | hsa-asg- | 4.01 | 3.35 | 5.43 | 4.26 | 1.07 | 33 | 1.65 | 0.78 | 2.18 | 1.21 | 1.92 | 1.97 | 2.78 | 2.62 | 2.74 | 1.98 | 0.69 | 0 | 1.3E−03 | 2.28 | 4.9 |
| 12227 | 12227_st1 | | | | | | | | | | | | | | | | | | | | | |
| hsa-asg- | hsa-asg- | 5.50 | 5.03 | 5.95 | 5.49 | 0.46 | 67 | 3.33 | 4.08 | 2.86 | 3.01 | 2.90 | 3.26 | 2.78 | 2.78 | 4.16 | 3.24 | 0.53 | 0 | 6.9E−05 | 2.25 | 4.8 |
| 8174 | 8174_st1 | | | | | | | | | | | | | | | | | | | | | |
| hsa-asg- | hsa-asg- | 4.69 | 5.39 | 4.44 | 4.84 | 0.49 | 33 | 2.43 | 2.36 | 1.39 | 4.00 | 2.19 | 2.35 | 3.40 | 2.78 | 2.54 | 2.60 | 0.74 | 0 | 7.1E−04 | 2.24 | 4.7 |
| 2484 | 2484_st2 | | | | | | | | | | | | | | | | | | | | | |
| hsa-miR- | hsa-miR- | 6.62 | 4.70 | 6.98 | 6.10 | 1.23 | 67 | 4.37 | 3.83 | 5.04 | 4.40 | 4.83 | 3.48 | 4.33 | 2.45 | 2.10 | 3.87 | 1.02 | 0 | 1.0E−02 | 2.23 | 4.7 |
| 585 | 585_st1 | | | | | | | | | | | | | | | | | | | | | |
| hsa-asg- | hsa-asg-13279_st1 | 9.38 | 9.14 | 9.81 | 9.44 | 0.34 | 100 | 7.58 | 7.47 | 7.55 | 8.17 | 7.24 | 6.59 | 6.87 | 7.00 | 6.68 | 7.24 | 0.51 | 100 | 4.1E−05 | 2.21 | 4.6 |
| 13279 | | | | | | | | | | | | | | | | | | | | | | |
| hsa-miR- | hsa-miR- | 12.7 | 12.5 | 12.87 | 12.7 | 0.15 | 100 | 11.0 | 10.5 | 10.5 | 11.4 | 11.1 | 10.1 | 10.1 | 9.52 | 10.3 | 10.5 | 0.59 | 100 | 1.0E−04 | 2.20 | 4.6 |
| 99b | 99b_st1 | | | | | | | | | | | | | | | | | | | | | |
| hsa-miR- | hsa-asg- | 12.8 | 12.7 | 12.93 | 12.8 | 0.11 | 100 | 11.2 | 10.6 | 10.6 | 11.6 | 11.3 | 10.3 | 10.3 | 9.55 | 10.5 | 10.7 | 0.65 | 100 | 2.8E−04 | 2.11 | 4.3 |
| 99b | 14196_st2 | | | | | | | | | | | | | | | | | | | | | |
| hsa-asg- | hsa-asg- | 5.77 | 5.71 | 6.65 | 6.04 | 0.53 | 100 | 4.31 | 3.74 | 4.39 | 4.58 | 3.33 | 3.48 | 2.78 | 3.95 | 4.07 | 3.85 | 0.57 | 0 | 1.6E−04 | 2.20 | 4.6 |
| 14230 | 14230_st1 | | | | | | | | | | | | | | | | | | | | | |
| hsa-asg- | hsa-asg- | 5.35 | 4.49 | 4.64 | 4.83 | 0.46 | 33 | 2.05 | 2.54 | 3.67 | 2.51 | 1.46 | 2.85 | 2.64 | 2.45 | 3.77 | 2.66 | 0.72 | 0 | 7.1E−04 | 2.17 | 4.5 |
| 13908 | 13908_st2 | | | | | | | | | | | | | | | | | | | | | |
| hsa-asg- | hsa-asg- | 8.02 | 8.13 | 8.42 | 8.19 | 0.21 | 100 | 7.66 | 6.59 | 4.47 | 8.11 | 7.31 | 4.95 | 6.96 | 3.91 | 4.32 | 6.03 | 1.61 | 56 | 4.9E−02 | 2.16 | 4.5 |
| 13097 | 13097_st1 | | | | | | | | | | | | | | | | | | | | | |
| hsa-miR- | hsa-miR- | 8.69 | 9.33 | 9.50 | 9.17 | 0.42 | 100 | 7.43 | 7.60 | 6.23 | 8.75 | 7.86 | 6.49 | 6.51 | 5.62 | 6.69 | 7.02 | 0.96 | 33 | 4.4E−03 | 2.15 | 4.4 |
| 497 | 497_st1 | | | | | | | | | | | | | | | | | | | | | |
| hsa-miR- | hsa- | 9.81 | 10.4 | 10.37 | 10.2 | 0.34 | 100 | 8.20 | 8.56 | 7.51 | 9.37 | 8.88 | 7.78 | 7.45 | 7.13 | 7.83 | 8.08 | 0.74 | 89 | 8.1E−04 | 2.12 | 4.4 |
| 497 | miR43_st1 | | | | | | | | | | | | | | | | | | | | | |
| hsa-asg- | hsa-asg- | 6.08 | 5.42 | 6.05 | 5.85 | 0.37 | 67 | 4.24 | 3.29 | 4.68 | 3.46 | 3.44 | 3.32 | 3.77 | 3.83 | 3.39 | 3.71 | 0.47 | 0 | 3.5E−05 | 2.14 | 4.4 |
| 14155 | 14155_st2 | | | | | | | | | | | | | | | | | | | | | |
| hsa-asg- | hsa-asg- | 4.52 | 4.28 | 5.78 | 4.86 | 0.80 | 33 | 2.25 | 2.71 | 2.18 | 4.71 | 2.83 | 2.99 | 1.08 | 2.78 | 3.09 | 2.74 | 0.96 | 0 | 6.6E−03 | 2.12 | 4.4 |
| 378 | 378_st1 | | | | | | | | | | | | | | | | | | | | | |
| hsa-miR- | hsa-miR- | 7.20 | 7.43 | 8.44 | 7.69 | 0.66 | 100 | 5.11 | 5.30 | 6.01 | 6.29 | 5.74 | 5.68 | 5.40 | 5.90 | 4.73 | 5.57 | 0.49 | 78 | 1.2E−04 | 2.12 | 4.3 |
| 542-3p | 542-3p_st1 | | | | | | | | | | | | | | | | | | | | | |
| hsa-asg-11443 | hsa-asg- | 4.99 | 5.08 | 5.64 | 5.23 | 0.35 | 67 | 4.17 | 3.64 | 2.86 | 2.69 | 3.54 | 2.69 | 3.40 | 2.78 | 2.33 | 3.12 | 0.59 | 0 | 1.8E−04 | 2.11 | 4.3 |
| | 11443_st1 | | | | | | | | | | | | | | | | | | | | | |
| hsa-miR- | hsa-miR- | 11.4 | 11.5 | 11.78 | 11.5 | 0.16 | 100 | 9.91 | 9.64 | 10.0 | 10.0 | 9.43 | 8.17 | 9.21 | 9.10 | 9.76 | 9.48 | 0.59 | 100 | 1.5E−04 | 2.11 | 4.3 |
| 106b | 106b_st2 | | | | | | | | | | | | | | | | | | | | | |
| hsa-miR- | hsa-miR- | 6.28 | 6.50 | 6.55 | 6.44 | 0.15 | 100 | 5.83 | 3.53 | 4.21 | 4.99 | 4.63 | 3.95 | 4.27 | 3.20 | 4.40 | 4.33 | 0.78 | 11 | 1.1E−03 | 2.11 | 4.3 |
| 154* | 154-_st2 | | | | | | | | | | | | | | | | | | | | | |
| hsa-miR- | hsa-miR- | 10.0 | 10.0 | 10.12 | 10.0 | 0.06 | 100 | 7.92 | 8.13 | 8.33 | 8.27 | 7.80 | 7.42 | 7.82 | 7.87 | 7.98 | 7.95 | 0.27 | 100 | 1.5E−07 | 2.11 | 4.3 |
| 324-5p | 324-5p_st1 | | | | | | | | | | | | | | | | | | | | | |
| hsa-miR- | hsa-miR- | 7.48 | 7.65 | 6.76 | 7.30 | 0.47 | 100 | 5.11 | 5.78 | 5.99 | 5.85 | 5.70 | 4.21 | 4.73 | 4.31 | 5.02 | 5.19 | 0.68 | 0 | 5.9E−04 | 2.11 | 4.3 |
| 134 | 134_st2 | | | | | | | | | | | | | | | | | | | | | |
| hsa-cand852 | hsa-cand852_st2 | 5.53 | 3.54 | 5.33 | 4.80 | 1.10 | 67 | 3.07 | 1.96 | 2.86 | 3.01 | 2.28 | 2.69 | 2.92 | 2.08 | 3.53 | 2.71 | 0.51 | 0 | 8.9E−04 | 2.09 | 4.2 |
| hsa-asg-14233 | hsa-asg- | 11.4 | 11.1 | 11.36 | 11.3 | 0.13 | 100 | 9.45 | 9.26 | 9.23 | 10.1 | 9.44 | 8.89 | 9.05 | 8.87 | 8.89 | 9.25 | 0.41 | 100 | 7.3E−06 | 2.07 | 4.2 |
| | 14233_st1 | | | | | | | | | | | | | | | | | | | | | |
| hsa-miR- | hsa-asg- | 9.96 | 10.1 | 10.36 | 10.1 | 0.20 | 100 | 8.63 | 8.31 | 8.53 | 8.45 | 7.87 | 7.92 | 7.91 | 7.33 | 7.81 | 8.08 | 0.42 | 100 | 1.2E−05 | 2.07 | 4.2 |
| 454-3p | 11541_st2 | | | | | | | | | | | | | | | | | | | | | |
| hsa-miR- | hsa-asg- | 10.6 | 10.5 | 10.86 | 10.6 | 0.19 | 100 | 9.63 | 8.98 | 9.24 | 9.13 | 8.55 | 8.77 | 8.57 | 7.82 | 8.33 | 8.78 | 0.54 | 100 | 1.8E−04 | 1.88 | 3.7 |
| 454-3p | 13305_st1 | | | | | | | | | | | | | | | | | | | | | |
| hsa-miR- | hsa-asg- | 5.22 | 4.28 | 5.04 | 4.85 | 0.50 | 33 | 3.66 | 3.42 | 3.23 | 1.93 | 2.45 | 1.97 | 1.60 | 3.20 | 3.53 | 2.78 | 0.79 | 0 | 1.8E−03 | 2.07 | 4.2 |
| 299-3p | 10378_st1 | | | | | | | | | | | | | | | | | | | | | |
| hsa-miR- | hsa-miR- | 9.11 | 8.82 | 8.40 | 8.78 | 0.36 | 100 | 7.17 | 6.85 | 7.35 | 7.13 | 7.43 | 6.56 | 6.29 | 5.93 | 5.81 | 6.72 | 0.61 | 78 | 2.8E−04 | 2.05 | 4.2 |
| 382 | 382_st1 | | | | | | | | | | | | | | | | | | | | | |
| hsa-asg- | hsa-asg-9687_st1 | 6.18 | 6.12 | 6.36 | 6.22 | 0.12 | 100 | 4.76 | 4.81 | 3.91 | 4.66 | 3.89 | 4.24 | 4.07 | 3.74 | 3.53 | 4.18 | 0.47 | 0 | 2.7E−05 | 2.04 | 4.1 |
| 9687 | | | | | | | | | | | | | | | | | | | | | | |
| hsa-miR- | hsa-asg- | 7.67 | 7.32 | 6.99 | 7.32 | 0.34 | 100 | 5.89 | 5.28 | 6.15 | 5.27 | 5.33 | 4.91 | 5.12 | 5.46 | 4.20 | 5.29 | 0.56 | 0 | 1.6E−04 | 2.03 | 4.1 |
| 330 | 14199_st1 | | | | | | | | | | | | | | | | | | | | | |
| hsa-miR- | hsa-miR- | 7.51 | 6.96 | 6.98 | 7.15 | 0.31 | 100 | 6.08 | 5.71 | 5.82 | 4.26 | 5.25 | 5.20 | 5.35 | 5.06 | 4.50 | 5.25 | 0.59 | 22 | 4.0E−04 | 1.90 | 3.7 |
| 330 | 330_st2 | | | | | | | | | | | | | | | | | | | | | |
| hsa-miR- | hsa-miR- | 6.02 | 6.04 | 4.30 | 5.45 | 1.00 | 33 | 4.66 | 3.10 | 4.07 | 3.01 | 2.28 | 1.88 | 4.33 | 3.49 | 4.11 | 3.43 | 0.95 | 0 | 1.0E−02 | 2.02 | 4.0 |
| 493-3p | 493-3p_st1 | | | | | | | | | | | | | | | | | | | | | |
| hsa-asg- | hsa-asg- | 3.62 | 4.49 | 4.86 | 4.33 | 0.64 | 33 | 1.65 | 1.75 | 3.06 | 1.31 | 2.01 | 2.99 | 3.29 | 2.45 | 2.33 | 2.31 | 0.69 | 0 | 1.2E−03 | 2.01 | 4.0 |
| 2367 | 2367_st1 | | | | | | | | | | | | | | | | | | | | | |
| hsa-miR-30e-5p | hsa-miR-30e-5p_st2 | 11.4 | 11.4 | 11.87 | 11.5 | 0.26 | 100 | 10.4 | 9.64 | 9.71 | 10.5 | 9.81 | 9.23 | 9.23 | 8.15 | 9.50 | 9.58 | 0.70 | 100 | 8.2E−04 | 2.00 | 4.0 |
| hsa-miR- | hsa-miR- | 13.2 | 13.0 | 13.29 | 13.1 | 0.14 | 100 | 12.0 | 11.7 | 10.9 | 12.2 | 11.6 | 11.1 | 10.8 | 9.75 | 10.5 | 11.2 | 0.79 | 100 | 1.7E−03 | 1.99 | 4.0 |
| 152 | 152_st1 | | | | | | | | | | | | | | | | | | | | | |
| hsa-asg- | hsa-asg- | 8.26 | 8.51 | 8.15 | 8.31 | 0.19 | 100 | 7.36 | 6.37 | 6.19 | 6.97 | 6.35 | 5.27 | 5.82 | 5.74 | 6.88 | 6.33 | 0.66 | 89 | 5.7E−04 | 1.98 | 3.9 |
| 925 | 925_st1 | | | | | | | | | | | | | | | | | | | | | |
| hsa-asg- | hsa-asg- | 5.33 | 5.16 | 5.83 | 5.44 | 0.35 | 67 | 4.09 | 3.02 | 3.67 | 4.76 | 3.39 | 2.69 | 3.17 | 3.32 | 3.09 | 3.47 | 0.63 | 0 | 4.8E−04 | 1.97 | 3.9 |
| 10679 | 10679_st2 | | | | | | | | | | | | | | | | | | | | | |
| hsa-asg- | hsa-asg- | 8.14 | 8.23 | 8.31 | 8.23 | 0.09 | 100 | 6.57 | 6.36 | 6.43 | 7.06 | 6.10 | 6.13 | 5.59 | 5.93 | 6.25 | 6.27 | 0.42 | 89 | 1.3E−05 | 1.96 | 3.9 |
| 14175 | 14175_st1 | | | | | | | | | | | | | | | | | | | | | |
| hsa- | hsa- | 10.6 | 10.6 | 11.04 | 10.7 | 0.22 | 100 | 9.62 | 9.10 | 9.23 | 9.55 | 8.87 | 8.54 | 8.50 | 8.15 | 7.91 | 8.83 | 0.60 | 100 | 3.0E−04 | 1.96 | 3.9 |
| miR257 | miR257_st1 | | | | | | | | | | | | | | | | | | | | | |
| hsa-miR- | hsa-miR- | 11.7 | 11.5 | 11.33 | 11.5 | 0.23 | 100 | 9.76 | 9.55 | 9.76 | 10.9 | 10.3 | 9.93 | 9.27 | 8.44 | 8.52 | 9.62 | 0.81 | 100 | 2.5E−03 | 1.95 | 3.9 |
| 214 | 214_st1 | | | | | | | | | | | | | | | | | | | | | |
| hsa-miR- | hsa-miR- | 9.17 | 9.23 | 9.52 | 9.30 | 0.19 | 100 | 7.66 | 7.30 | 7.35 | 8.09 | 7.56 | 6.92 | 7.41 | 6.65 | 7.27 | 7.36 | 0.41 | 0 | 1.6E−05 | 1.95 | 3.9 |
| 324-3p | 324-3p_st1 | | | | | | | | | | | | | | | | | | | | | |
| hsa-miR- | hsa-miR- | 7.89 | 9.24 | 8.93 | 8.69 | 0.70 | 100 | 7.92 | 6.71 | 6.74 | 8.78 | 7.67 | 5.74 | 7.42 | 4.41 | 5.39 | 6.75 | 1.38 | 67 | 4.5E−02 | 1.93 | 3.8 |
| 452 | 452_st1 | | | | | | | | | | | | | | | | | | | | | |
| hsa-miR- | hsa-miR- | 9.09 | 9.41 | 9.71 | 9.40 | 0.31 | 100 | 8.38 | 8.32 | 7.31 | 8.03 | 8.04 | 6.51 | 6.91 | 6.53 | 7.20 | 7.47 | 0.74 | 100 | 1.6E−03 | 1.93 | 3.8 |
| 19b | 19b_st2 | | | | | | | | | | | | | | | | | | | | | |
| hsa-miR- | hsa-miR- | 8.10 | 8.18 | 8.30 | 8.19 | 0.10 | 100 | 6.59 | 6.67 | 6.42 | 6.87 | 6.43 | 6.02 | 5.86 | 6.26 | 5.29 | 6.27 | 0.48 | 89 | 5.7E−05 | 1.93 | 3.8 |
| 425-3p | 425_st2 | | | | | | | | | | | | | | | | | | | | | |
| hsa-miR- | hsa-miR- | 8.78 | 8.59 | 8.45 | 8.61 | 0.17 | 100 | 6.40 | 7.30 | 7.22 | 6.96 | 6.63 | 7.66 | 5.73 | 5.86 | 6.60 | 6.71 | 0.65 | 100 | 6.5E−04 | 1.90 | 3.7 |
| 494 | 494_st1 | | | | | | | | | | | | | | | | | | | | | |
| hsa-miR- | hsa- | 7.97 | 7.80 | 8.07 | 7.94 | 0.14 | 100 | 6.83 | 6.55 | 6.85 | 6.43 | 6.38 | 7.10 | 5.40 | 5.79 | 6.89 | 6.47 | 0.55 | 89 | 1.2E−03 | 1.48 | 2.8 |
| 494 | miR61_st2 | | | | | | | | | | | | | | | | | | | | | |
| hsa-asg- | hsa-asg- | 5.89 | 4.98 | 5.42 | 5.43 | 0.45 | 33 | 4.02 | 3.23 | 3.96 | 4.46 | 3.33 | 2.17 | 2.48 | 4.11 | 4.02 | 3.53 | 0.79 | 0 | 3.0E−03 | 1.90 | 3.7 |
| 1707 | 1707_st2 | | | | | | | | | | | | | | | | | | | | | |
| hsa-miR- | hsa-miR- | 11.3 | 11.0 | 11.34 | 11.2 | 0.18 | 100 | 10.7 | 9.36 | 9.71 | 9.95 | 8.86 | 8.99 | 9.01 | 8.77 | 8.68 | 9.35 | 0.69 | 100 | 1.0E−03 | 1.88 | 3.7 |
| 128a | 128a_st2 | | | | | | | | | | | | | | | | | | | | | |
| hsa-asg- | hsa-asg- | 6.20 | 5.72 | 6.42 | 6.11 | 0.36 | 67 | 4.43 | 5.12 | 4.02 | 3.21 | 4.39 | 4.18 | 4.14 | 4.21 | 4.40 | 4.23 | 0.50 | 0 | 1.3E−04 | 1.88 | 3.7 |
| 1596 | 1596_st2 | | | | | | | | | | | | | | | | | | | | | |
| hsa-miR- | hsa-miR- | 6.41 | 6.48 | 6.57 | 6.49 | 0.08 | 100 | 5.29 | 4.40 | 5.55 | 5.86 | 5.01 | 3.78 | 4.27 | 4.03 | 3.32 | 4.61 | 0.86 | 11 | 4.3E−03 | 1.88 | 3.7 |
| 296 | 296_st1 | | | | | | | | | | | | | | | | | | | | | |
| hsa-miR-28 | hsa-miR- | 12.4 | 12.1 | 12.38 | 12.3 | 0.12 | 100 | 11.1 | 10.7 | 10.0 | 11.0 | 10.8 | 10.1 | 10.1 | 9.40 | 10.5 | 10.4 | 0.57 | 100 | 2.7E−04 | 1.87 | 3.6 |
| | 28_st1 | | | | | | | | | | | | | | | | | | | | | |
| hsa-asg-13888 | hsa-asg- | 4.01 | 4.21 | 4.14 | 4.12 | 0.10 | 33 | 1.45 | 2.87 | 1.66 | 3.15 | 1.83 | 2.17 | 2.64 | 1.88 | 2.74 | 2.26 | 0.60 | 0 | 4.3E−04 | 1.86 | 3.6 |
| | 13888_st2 | | | | | | | | | | | | | | | | | | | | | |
| hsa-cand581 | hsa-cand581_st1 | 5.28 | 5.12 | 5.49 | 5.29 | 0.18 | 67 | 3.85 | 3.64 | 3.67 | 3.91 | 3.72 | 2.69 | 3.85 | 2.45 | 3.25 | 3.45 | 0.54 | 0 | 2.0E−04 | 1.85 | 3.6 |
| hsa-miR- | hsa-miR- | 11.3 | 11.5 | 11.83 | 11.5 | 0.26 | 100 | 10.4 | 9.56 | 9.54 | 10.2 | 9.75 | 9.33 | 9.52 | 9.38 | 9.86 | 9.73 | 0.37 | 100 | 1.3E−05 | 1.85 | 3.6 |
| 222 | 222_st2 | | | | | | | | | | | | | | | | | | | | | |
| hsa-asg- | hsa-asg- | 5.03 | 5.46 | 5.84 | 5.44 | 0.40 | 67 | 3.45 | 3.53 | 3.23 | 4.36 | 3.81 | 3.48 | 4.14 | 3.74 | 2.74 | 3.61 | 0.48 | 0 | 1.5E−04 | 1.84 | 3.6 |
| 4140 | 4140_st2 | | | | | | | | | | | | | | | | | | | | | |
| hsa-miR- | hsa-miR- | 8.47 | 8.35 | 8.39 | 8.40 | 0.06 | 100 | 7.01 | 5.98 | 6.51 | 8.11 | 7.01 | 5.65 | 6.50 | 5.99 | 6.37 | 6.57 | 0.74 | 100 | 1.9E−03 | 1.83 | 3.6 |
| 374 | 374_st2 | | | | | | | | | | | | | | | | | | | | | |
| hsa-miR- | hsa-miR- | 5.86 | 6.23 | 6.87 | 6.32 | 0.51 | 67 | 4.31 | 4.79 | 2.54 | 5.96 | 5.84 | 4.28 | 3.85 | 3.59 | 5.29 | 4.49 | 1.11 | 0 | 2.4E−02 | 1.83 | 3.5 |
| 504 | 504_st1 | | | | | | | | | | | | | | | | | | | | | |
| hsa-miR- | hsa-miR- | 7.31 | 7.23 | 7.50 | 7.35 | 0.14 | 100 | 5.78 | 6.02 | 7.10 | 5.97 | 4.53 | 4.14 | 5.69 | 5.67 | 4.89 | 5.53 | 0.89 | 44 | 6.7E−03 | 1.81 | 3.5 |
| 18a | 18a_st1 | | | | | | | | | | | | | | | | | | | | | |
| hsa-cand207 | hsa-cand207_st1 | 4.92 | 5.46 | 4.71 | 5.03 | 0.38 | 33 | 2.61 | 4.16 | 3.67 | 2.51 | 3.68 | 3.69 | 2.64 | 2.78 | 3.25 | 3.22 | 0.60 | 0 | 7.3E−04 | 1.81 | 3.5 |
| hsa-asg- | hsa-asg- | 4.46 | 4.49 | 5.22 | 4.72 | 0.43 | 33 | 2.43 | 3.29 | 3.54 | 3.28 | 2.69 | 1.97 | 3.50 | 2.62 | 2.92 | 2.92 | 0.53 | 0 | 3.5E−04 | 1.81 | 3.5 |
| 9702 | 9702_st2 | | | | | | | | | | | | | | | | | | | | | |
| hsa-miR- | hsa-miR- | 8.56 | 8.66 | 9.24 | 8.82 | 0.37 | 100 | 7.60 | 6.47 | 7.28 | 8.05 | 7.76 | 6.27 | 6.60 | 6.18 | 6.88 | 7.01 | 0.69 | 100 | 1.6E−03 | 1.81 | 3.5 |
| 186 | 186_st1 | | | | | | | | | | | | | | | | | | | | | |
| hsa-miR- | hsa-miR- | 6.78 | 7.31 | 7.86 | 7.32 | 0.54 | 100 | 6.66 | 5.97 | 5.21 | 6.67 | 5.29 | 5.13 | 5.02 | 4.25 | 5.44 | 5.51 | 0.79 | 33 | 4.7E−03 | 1.80 | 3.5 |
| 339 | 339_st1 | | | | | | | | | | | | | | | | | | | | | |
| hsa-miR- | hsa-miR- | 7.60 | 8.07 | 7.85 | 7.84 | 0.23 | 100 | 7.73 | 6.16 | 6.37 | 7.22 | 6.63 | 5.50 | 4.78 | 4.78 | 5.27 | 6.05 | 1.05 | 44 | 1.7E−02 | 1.79 | 3.5 |
| 140 | 140_st2 | | | | | | | | | | | | | | | | | | | | | |
| hsa-miR- | hsa-asg- | 7.41 | 8.24 | 8.07 | 7.90 | 0.44 | 100 | 7.75 | 7.03 | 6.53 | 7.45 | 6.62 | 5.05 | 5.71 | 3.83 | 5.23 | 6.13 | 1.28 | 67 | 4.4E−02 | 1.77 | 3.4 |
| 140 | 14239_st1 | | | | | | | | | | | | | | | | | | | | | |
| hsa-miR- | hsa-miR- | 6.57 | 6.75 | 6.71 | 6.68 | 0.09 | 100 | 5.73 | 4.76 | 3.06 | 5.53 | 6.52 | 4.49 | 5.88 | 4.35 | 3.65 | 4.88 | 1.13 | 33 | 2.3E−02 | 1.79 | 3.5 |
| 193a | 193a_st1 | | | | | | | | | | | | | | | | | | | | | |
| hsa-asg- | hsa-asg- | 6.04 | 5.65 | 6.16 | 5.95 | 0.27 | 100 | 4.85 | 4.30 | 4.98 | 4.76 | 3.72 | 2.85 | 4.07 | 3.32 | 4.54 | 4.16 | 0.73 | 0 | 2.4E−03 | 1.79 | 3.5 |
| 9681 | 9681_st1 | | | | | | | | | | | | | | | | | | | | | |
| hsa-miR- | hsa-miR- | 11.6 | 11.3 | 11.64 | 11.5 | 0.16 | 100 | 11.2 | 9.83 | 10.0 | 10.3 | 9.19 | 9.33 | 9.54 | 9.19 | 9.25 | 9.77 | 0.69 | 100 | 1.5E−03 | 1.78 | 3.4 |
| 128b | 128b_st1 | | | | | | | | | | | | | | | | | | | | | |
| hsa-asg- | hsa-asg- | 6.65 | 6.71 | 6.96 | 6.78 | 0.17 | 100 | 4.71 | 6.29 | 6.06 | 5.88 | 5.25 | 5.56 | 4.44 | 2.27 | 4.47 | 4.99 | 1.23 | 11 | 3.5E−02 | 1.78 | 3.4 |
| 2924 | 2924_st1 | | | | | | | | | | | | | | | | | | | | | |
| hsa-miR- | hsa-miR- | 7.47 | 7.05 | 7.31 | 7.28 | 0.21 | 33 | 5.25 | 6.17 | 5.04 | 5.61 | 5.54 | 5.75 | 5.14 | 5.51 | 5.46 | 5.50 | 0.34 | 0 | 8.1E−06 | 1.78 | 3.4 |
| 491 | 491_st1 | | | | | | | | | | | | | | | | | | | | | |
| hsa-asg-10360 | hsa-asg- | 5.08 | 5.08 | 5.09 | 5.08 | 0.01 | 33 | 3.45 | 3.42 | 3.06 | 4.66 | 3.72 | 3.26 | 3.17 | 2.45 | 2.74 | 3.32 | 0.63 | 0 | 8.7E−04 | 1.76 | 3.4 |
| | 10360_st1 | | | | | | | | | | | | | | | | | | | | | |
| hsa-asg- | hsa-asg- | 5.66 | 5.94 | 6.50 | 6.04 | 0.43 | 67 | 4.49 | 3.53 | 4.02 | 5.45 | 4.77 | 3.64 | 4.00 | 4.35 | 4.32 | 4.28 | 0.59 | 0 | 8.6E−04 | 1.75 | 3.4 |
| 360 | 360_st2 | | | | | | | | | | | | | | | | | | | | | |
| hsa-miR- | hsa-miR- | 9.43 | 9.12 | 9.51 | 9.35 | 0.20 | 100 | 8.30 | 7.88 | 7.20 | 8.00 | 7.35 | 7.52 | 7.24 | 7.66 | 7.44 | 7.62 | 0.37 | 100 | 2.0E−05 | 1.73 | 3.3 |
| 628 | 628_st2 | | | | | | | | | | | | | | | | | | | | | |
| hsa-asg- | hsa-asg- | 6.82 | 6.21 | 6.73 | 6.59 | 0.33 | 100 | 5.78 | 4.58 | 5.35 | 5.50 | 4.91 | 5.32 | 4.14 | 3.95 | 4.57 | 4.90 | 0.63 | 0 | 1.4E−03 | 1.69 | 3.2 |
| 14138 | 14138_st2 | | | | | | | | | | | | | | | | | | | | | |
| hsa-miR- | hsa-miR- | 13.9 | 14.0 | 13.89 | 13.9 | 0.07 | 100 | 12.5 | 12.3 | 12.0 | 13.2 | 12.8 | 11.9 | 11.9 | 11.0 | 12.5 | 12.2 | 0.64 | 100 | 1.3E−03 | 1.68 | 3.2 |
| 27b | 27b_st1 | | | | | | | | | | | | | | | | | | | | | |
| hsa- | hsa- | 6.10 | 5.16 | 4.21 | 5.16 | 0.95 | 33 | 3.85 | 2.71 | 4.93 | 3.95 | 3.63 | 2.44 | 4.27 | 2.45 | 3.09 | 3.48 | 0.87 | 0 | 1.7E−02 | 1.67 | 3.2 |
| miR202 | miR202_st2 | | | | | | | | | | | | | | | | | | | | | |
| hsa-miR- | hsa-miR- | 12.7 | 12.7 | 12.71 | 12.7 | 0.04 | 100 | 11.3 | 11.0 | 11.0 | 12.0 | 11.5 | 10.6 | 10.6 | 10.2 | 11.1 | 11.0 | 0.54 | 100 | 4.2E−04 | 1.67 | 3.2 |
| 27a | 27a_st2 | | | | | | | | | | | | | | | | | | | | | |
| hsa- | hsa- | 5.16 | 5.16 | 5.05 | 5.12 | 0.06 | 67 | 3.76 | 3.02 | 3.23 | 4.00 | 4.24 | 3.37 | 2.64 | 3.44 | 3.39 | 3.45 | 0.49 | 0 | 1.9E−04 | 1.67 | 3.2 |
| cand821 | cand821_st1 | | | | | | | | | | | | | | | | | | | | | |
| hsa-miR- | hsa-miR- | 7.29 | 7.21 | 6.59 | 7.03 | 0.38 | 100 | 6.27 | 5.73 | 6.17 | 5.72 | 5.17 | 5.11 | 4.59 | 4.98 | 4.76 | 5.39 | 0.61 | 11 | 1.5E−03 | 1.64 | 3.1 |
| 212 | 212_st2 | | | | | | | | | | | | | | | | | | | | | |
| hsa-miR- | hsa-miR- | 7.48 | 7.39 | 6.98 | 7.28 | 0.27 | 100 | 5.14 | 5.04 | 6.67 | 6.09 | 6.11 | 5.17 | 5.92 | 5.45 | 5.27 | 5.65 | 0.57 | 44 | 8.4E−04 | 1.63 | 3.1 |
| 409-5p | 409-5p_st1 | | | | | | | | | | | | | | | | | | | | | |
| hsa-miR- | hsa-miR- | 9.72 | 9.64 | 9.72 | 9.69 | 0.05 | 100 | 9.76 | 7.76 | 8.97 | 9.69 | 7.39 | 7.36 | 7.88 | 7.63 | 6.14 | 8.06 | 1.19 | 89 | 4.4E−02 | 1.63 | 3.1 |
| 505 | 505_st1 | | | | | | | | | | | | | | | | | | | | | |
| hsa-asg- | hsa-asg- | 6.18 | 6.79 | 6.54 | 6.51 | 0.31 | 100 | 4.66 | 4.37 | 4.02 | 6.18 | 5.09 | 4.21 | 5.16 | 5.22 | 5.05 | 4.88 | 0.66 | 11 | 2.3E−03 | 1.62 | 3.1 |
| 7465 | 7465_st2 | | | | | | | | | | | | | | | | | | | | | |
| hsa-asg- | hsa-asg- | 8.16 | 8.28 | 7.69 | 8.04 | 0.31 | 100 | 6.62 | 6.49 | 6.49 | 7.56 | 7.45 | 5.68 | 6.35 | 5.00 | 6.23 | 6.43 | 0.79 | 67 | 7.3E−03 | 1.62 | 3.1 |
| 13304 | 13304_st2 | | | | | | | | | | | | | | | | | | | | | |
| hsa-miR- | hsa- | 5.56 | 4.79 | 4.30 | 4.88 | 0.64 | 33 | 4.31 | 2.54 | 4.12 | 3.28 | 2.45 | 3.26 | 3.59 | 2.78 | 3.09 | 3.27 | 0.65 | 0 | 3.8E−03 | 1.61 | 3.1 |
| 485-3p | miR23_st2 | | | | | | | | | | | | | | | | | | | | | |
| hsa-miR- | hsa-miR- | 5.65 | 5.52 | 4.88 | 5.35 | 0.41 | 67 | 3.66 | 3.02 | 4.30 | 4.43 | 4.27 | 3.13 | 3.68 | 3.54 | 3.87 | 3.77 | 0.50 | 0 | 6.2E−04 | 1.58 | 3.0 |
| 485-3p | 485-3p_st2 | | | | | | | | | | | | | | | | | | | | | |
| hsa-miR- | hsa-miR- | 4.90 | 5.35 | 4.90 | 5.05 | 0.26 | 67 | 3.66 | 3.53 | 3.39 | 4.71 | 3.44 | 3.37 | 4.07 | 1.88 | 2.92 | 3.44 | 0.77 | 0 | 6.2E−03 | 1.61 | 3.1 |
| 599 | 599_st2 | | | | | | | | | | | | | | | | | | | | | |
| hsa-asg- | hsa-asg- | 3.62 | 4.04 | 4.78 | 4.15 | 0.58 | 33 | 3.07 | 3.29 | 2.18 | 3.01 | 2.19 | 2.35 | 1.25 | 3.20 | 2.33 | 2.54 | 0.66 | 0 | 3.9E−03 | 1.61 | 3.0 |
| 13997 | 13997_st2 | | | | | | | | | | | | | | | | | | | | | |
| hsa-asg-14133 | hsa-asg- | 8.58 | 8.63 | 8.93 | 8.71 | 0.19 | 100 | 8.97 | 6.97 | 7.91 | 7.93 | 6.95 | 6.01 | 7.09 | 5.86 | 6.31 | 7.11 | 1.01 | 89 | 2.4E−02 | 1.60 | 3.0 |
| | 14133_st2 | | | | | | | | | | | | | | | | | | | | | |
| hsa-miR- | hsa-miR- | 10.6 | 10.7 | 10.85 | 10.7 | 0.08 | 100 | 10.0 | 8.79 | 9.44 | 10.0 | 9.63 | 8.27 | 9.09 | 8.14 | 9.14 | 9.18 | 0.70 | 100 | 3.2E−03 | 1.60 | 3.0 |
| 148b | 148b_st2 | | | | | | | | | | | | | | | | | | | | | |
| hsa-miR- | hsa-miR- | 7.25 | 6.97 | 7.38 | 7.20 | 0.21 | 100 | 6.18 | 5.61 | 6.71 | 6.01 | 5.09 | 4.68 | 5.71 | 4.87 | 5.60 | 5.61 | 0.65 | 44 | 2.2E−03 | 1.60 | 3.0 |
| 18b | 18b_st1 | | | | | | | | | | | | | | | | | | | | | |
| hsa-miR- | hsa-miR- | 10.8 | 10.7 | 10.46 | 10.7 | 0.21 | 100 | 10.5 | 9.57 | 9.77 | 9.80 | 8.72 | 9.01 | 9.09 | 7.97 | 7.54 | 9.11 | 0.94 | 100 | 1.7E−02 | 1.59 | 3.0 |
| 423 | 423_st1 | | | | | | | | | | | | | | | | | | | | | |
| hsa-asg- | hsa-asg- | 4.61 | 5.59 | 6.36 | 5.52 | 0.88 | 33 | 4.55 | 3.36 | 4.50 | 5.28 | 4.04 | 3.26 | 3.59 | 3.59 | 3.17 | 3.93 | 0.72 | 0 | 1.0E−02 | 1.59 | 3.0 |
| 7417 | 7417_st1 | | | | | | | | | | | | | | | | | | | | | |
| hsa-asg- | hsa-asg- | 6.20 | 6.36 | 6.11 | 6.22 | 0.13 | 100 | 5.03 | 4.55 | 4.54 | 5.96 | 4.85 | 4.49 | 4.33 | 3.99 | 4.16 | 4.66 | 0.58 | 22 | 1.1E−03 | 1.57 | 3.0 |
| 13011 | 13011_st2 | | | | | | | | | | | | | | | | | | | | | |
| hsa-miR- | hsa-miR- | 11.0 | 10.8 | 10.96 | 10.9 | 0.09 | 100 | 10.2 | 9.76 | 9.14 | 9.80 | 9.38 | 9.47 | 9.04 | 8.51 | 9.05 | 9.37 | 0.50 | 100 | 4.6E−04 | 1.55 | 2.9 |
| 151 | 151_st2 | | | | | | | | | | | | | | | | | | | | | |
| hsa-miR- | hsa-cand144_st1 | 11.6 | 11.7 | 11.63 | 11.6 | 0.04 | 100 | 10.4 | 9.85 | 9.72 | 10.9 | 10.8 | 9.26 | 10.0 | 9.56 | 10.6 | 10.1 | 0.59 | 100 | 1.3E−03 | 1.54 | 2.9 |
| 130a | | | | | | | | | | | | | | | | | | | | | | |
| hsa-asg- | hsa-asg- | 7.78 | 7.66 | 7.03 | 7.49 | 0.40 | 67 | 6.42 | 6.07 | 5.71 | 6.89 | 6.85 | 4.84 | 5.33 | 5.29 | 6.16 | 5.95 | 0.71 | 0 | 5.9E−03 | 1.54 | 2.9 |
| 279 | 279_st2 | | | | | | | | | | | | | | | | | | | | | |
| hsa-miR- | hsa-miR- | 10.7 | 11.3 | 10.68 | 10.9 | 0.38 | 100 | 10.9 | 10.3 | 8.69 | 10.0 | 9.47 | 9.34 | 9.58 | 7.33 | 9.03 | 9.42 | 1.03 | 100 | 3.4E−02 | 1.54 | 2.9 |
| 335 | 335_st1 | | | | | | | | | | | | | | | | | | | | | |
| hsa-asg- | hsa-asg- | 4.69 | 5.52 | 4.54 | 4.92 | 0.53 | 33 | 3.76 | 4.61 | 3.79 | 3.28 | 4.24 | 2.99 | 3.85 | 1.48 | 2.74 | 3.42 | 0.93 | 0 | 2.61E−02 | 1.50 | 2.8 |
| 14238 | 14238_st1 | | | | | | | | | | | | | | | | | | | | | |
| hsa-asg- | hsa-asg- | 4.32 | 5.49 | 5.66 | 5.16 | 0.73 | 67 | 4.24 | 3.64 | 1.92 | 4.08 | 4.58 | 4.89 | 3.05 | 3.32 | 3.25 | 3.66 | 0.90 | 0 | 2.77E−02 | 1.50 | 2.8 |
| 1270 | 1270_st2 | | | | | | | | | | | | | | | | | | | | | |
| hsa-asg- | hsa-asg- | 4.64 | 3.95 | 5.09 | 4.56 | 0.57 | 33 | 3.07 | 1.96 | 3.54 | 3.52 | 2.83 | 1.97 | 3.40 | 2.78 | 4.60 | 3.07 | 0.83 | 0 | 1.72E−02 | 1.49 | 2.8 |
| 548 | 548_st1 | | | | | | | | | | | | | | | | | | | | | |
| hsa-miR- | hsa-miR- | 9.06 | 7.68 | 8.69 | 8.47 | 0.71 | 100 | 7.66 | 6.76 | 6.71 | 7.93 | 7.56 | 5.83 | 7.52 | 6.32 | 6.65 | 6.99 | 0.70 | 89 | 1.04E−02 | 1.48 | 2.8 |
| 183 | 183_st1 | | | | | | | | | | | | | | | | | | | | | |
| hsa-asg- | hsa-asg- | 4.39 | 4.36 | 5.19 | 4.65 | 0.47 | 33 | 3.93 | 3.74 | 2.86 | 3.73 | 3.22 | 1.78 | 4.00 | 2.45 | 2.92 | 3.18 | 0.75 | 0 | 1.09E−02 | 1.46 | 2.8 |
| 13819 | 13819_st1 | | | | | | | | | | | | | | | | | | | | | |
| hsa-asg- | hsa-asg- | 9.61 | 9.58 | 9.59 | 9.59 | 0.01 | 100 | 8.46 | 7.83 | 8.45 | 8.85 | 8.22 | 7.49 | 8.10 | 7.55 | 8.21 | 8.13 | 0.45 | 78 | 2.56E−04 | 1.46 | 2.8 |
| 7643 | 7643_st2 | | | | | | | | | | | | | | | | | | | | | |
| hsa-miR- | hsa-miR- | 11.4 | 11.6 | 11.63 | 11.5 | 0.08 | 100 | 10.3 | 9.96 | 9.71 | 10.9 | 10.7 | 9.21 | 10.0 | 9.63 | 10.4 | 10.1 | 0.56 | 100 | 1.49E−03 | 1.45 | 2.7 |
| 130a | 130a_st1 | | | | | | | | | | | | | | | | | | | | | |
| hsa-asg- | hsa-asg- | 7.41 | 7.76 | 7.13 | 7.44 | 0.32 | 100 | 6.68 | 6.40 | 5.82 | 6.62 | 6.67 | 5.74 | 5.32 | 5.31 | 5.40 | 6.00 | 0.60 | 33 | 2.95E−03 | 1.44 | 2.7 |
| 8067 | 8067_st2 | | | | | | | | | | | | | | | | | | | | | |
| hsa-asg- | hsa-asg- | 4.61 | 4.49 | 5.55 | 4.88 | 0.58 | 33 | 3.45 | 4.49 | 1.66 | 4.55 | 3.59 | 4.24 | 3.85 | 2.08 | 3.09 | 3.44 | 1.02 | 0 | 4.61E−02 | 1.44 | 2.7 |
| 8616 | 8616_st2 | | | | | | | | | | | | | | | | | | | | | |
| hsa-asg- | hsa-asg- | 4.49 | 4.43 | 5.36 | 4.76 | 0.52 | 33 | 4.37 | 3.29 | 2.86 | 4.81 | 3.16 | 2.85 | 2.32 | 3.07 | 3.25 | 3.33 | 0.78 | 0 | 1.56E−02 | 1.43 | 2.7 |
| 1619 | 1619_st2 | | | | | | | | | | | | | | | | | | | | | |
| hsa-asg- | hsa-asg- | 5.35 | 3.28 | 3.18 | 3.93 | 1.22 | 33 | 2.25 | 3.42 | 2.18 | 3.15 | 2.01 | 2.35 | 1.79 | 2.93 | 2.54 | 2.51 | 0.54 | 0 | 1.55E−02 | 1.42 | 2.7 |
| 5721 | 5721_st2 | | | | | | | | | | | | | | | | | | | | | |
| hsa-asg- | hsa-asg- | 5.38 | 4.76 | 5.46 | 5.20 | 0.38 | 33 | 4.90 | 2.87 | 4.02 | 4.26 | 3.93 | 2.69 | 3.68 | 3.44 | 4.24 | 3.78 | 0.70 | 0 | 8.24E−03 | 1.42 | 2.7 |
| 12964 | 12964_st2 | | | | | | | | | | | | | | | | | | | | | |
| hsa-asg- | hsa-asg- | 7.22 | 7.48 | 7.64 | 7.45 | 0.21 | 100 | 6.89 | 6.98 | 5.06 | 5.95 | 6.49 | 7.01 | 4.94 | 6.34 | 4.57 | 6.03 | 0.95 | 67 | 3.16E−02 | 1.42 | 2.7 |
| 6277 | 6277_st2 | | | | | | | | | | | | | | | | | | | | | |
| hsa-miR- | hsa-miR- | 7.41 | 7.69 | 7.42 | 7.50 | 0.16 | 100 | 6.42 | 6.72 | 6.06 | 6.22 | 5.80 | 6.66 | 5.59 | 5.77 | 5.53 | 6.09 | 0.45 | 100 | 3.85E−04 | 1.42 | 2.7 |
| 142-5p | 142-5p_st2 | | | | | | | | | | | | | | | | | | | | | |
| hsa-asg- | hsa-asg- | 5.80 | 5.97 | 6.11 | 5.96 | 0.15 | 67 | 4.81 | 4.61 | 4.21 | 5.39 | 5.05 | 4.46 | 4.49 | 3.20 | 4.67 | 4.54 | 0.61 | 0 | 3.18E−03 | 1.41 | 2.7 |
| 12465 | 12465_st1 | | | | | | | | | | | | | | | | | | | | | |
| hsa-asg- | hsa-asg- | 3.73 | 5.56 | 4.00 | 4.43 | 0.99 | 33 | 4.31 | 3.42 | 3.06 | 3.73 | 3.44 | 2.69 | 1.60 | 2.78 | 2.33 | 3.04 | 0.80 | 0 | 3.25E−02 | 1.39 | 2.6 |
| 3976 | 3976_st1 | | | | | | | | | | | | | | | | | | | | | |
| hsa-asg- | hsa-asg- | 5.54 | 4.91 | 5.73 | 5.40 | 0.43 | 33 | 4.02 | 4.30 | 3.06 | 4.12 | 4.60 | 4.37 | 3.68 | 4.14 | 3.77 | 4.01 | 0.46 | 0 | 9.60E−04 | 1.39 | 2.6 |
| 12515 | 12515_st2 | | | | | | | | | | | | | | | | | | | | | |
| hsa-asg- | hsa-asg- | 6.36 | 6.50 | 6.47 | 6.44 | 0.07 | 100 | 5.48 | 5.06 | 4.96 | 6.07 | 5.36 | 4.52 | 5.05 | 3.78 | 5.20 | 5.05 | 0.64 | 11 | 4.42E−03 | 1.39 | 2.6 |
| 5715 | 5715_st2 | | | | | | | | | | | | | | | | | | | | | |
| hsa-asg- | hsa-asg- | 7.19 | 6.14 | 7.21 | 6.85 | 0.61 | 100 | 5.68 | 5.19 | 5.28 | 6.40 | 6.25 | 5.59 | 4.98 | 4.47 | 5.35 | 5.46 | 0.60 | 33 | 6.46E−03 | 1.38 | 2.6 |
| 3145 | 3145_st1 | | | | | | | | | | | | | | | | | | | | | |
| hsa-miR- | hsa-miR- | 13.2 | 13.2 | 13.25 | 13.2 | 0.02 | 100 | 12.2 | 12.1 | 11.9 | 12.5 | 12.1 | 11.7 | 11.5 | 10.8 | 11.8 | 11.8 | 0.48 | 100 | 6.67E−04 | 1.38 | 2.6 |
| 30a-5p | 30a-5p_st2 | | | | | | | | | | | | | | | | | | | | | |
| hsa-miR-93 | hsa-miR- | 12.1 | 12.2 | 12.33 | 12.2 | 0.11 | 100 | 10.6 | 10.8 | 11.0 | 11.5 | 10.9 | 10.4 | 10.9 | 10.3 | 11.0 | 10.8 | 0.36 | 100 | 8.27E−05 | 1.37 | 2.6 |
| | 93_st2 | | | | | | | | | | | | | | | | | | | | | |
| hsa-asg- | hsa-asg- | 5.54 | 6.21 | 5.22 | 5.66 | 0.50 | 100 | 5.29 | 4.76 | 4.54 | 5.04 | 4.42 | 4.18 | 3.29 | 3.91 | 3.25 | 4.30 | 0.72 | 22 | 1.31E−02 | 1.36 | 2.6 |
| 259 | 259_st2 | | | | | | | | | | | | | | | | | | | | | |
| hsa-asg-12277 | hsa-asg- | 5.03 | 5.08 | 5.38 | 5.16 | 0.19 | 67 | 3.85 | 3.64 | 4.02 | 4.71 | 3.72 | 3.26 | 3.68 | 3.44 | 3.97 | 3.81 | 0.42 | 0 | 3.38E−04 | 1.35 | 2.6 |
| | 12277_st1 | | | | | | | | | | | | | | | | | | | | | |
| hsa-miR- | hsa-miR- | 12.3 | 12.1 | 12.22 | 12.2 | 0.11 | 100 | 11.2 | 11.1 | 11.2 | 11.4 | 11.4 | 10.8 | 10.4 | 10.1 | 10.0 | 10.9 | 0.55 | 100 | 2.27E−03 | 1.35 | 2.5 |
| 320 | 320_st1 | | | | | | | | | | | | | | | | | | | | | |
| hsa-miR-98 | hsa-miR- | 12.4 | 12.2 | 12.39 | 12.3 | 0.08 | 100 | 11.5 | 11.0 | 11.1 | 11.5 | 11.0 | 10.8 | 10.9 | 10.1 | 10.6 | 11.0 | 0.43 | 100 | 4.25E−04 | 1.34 | 2.5 |
| | 98_st1 | | | | | | | | | | | | | | | | | | | | | |
| hsa-miR- | hsa-miR- | 10.1 | 10.6 | 10.92 | 10.5 | 0.39 | 100 | 10.0 | 9.44 | 9.16 | 9.78 | 9.72 | 7.50 | 8.94 | 8.77 | 9.53 | 9.21 | 0.76 | 100 | 1.70E−02 | 1.34 | 2.5 |
| 29c | 29c_st2 | | | | | | | | | | | | | | | | | | | | | |
| hsa-asg- | hsa-asg- | 7.93 | 8.08 | 8.05 | 8.02 | 0.08 | 100 | 7.33 | 7.11 | 5.45 | 7.16 | 6.78 | 6.86 | 6.78 | 6.84 | 5.84 | 6.68 | 0.63 | 33 | 5.10E−03 | 1.34 | 2.5 |
| 872 | 872_st2 | | | | | | | | | | | | | | | | | | | | | |
| hsa-asg-10674 | hsa-asg- | 6.22 | 6.07 | 6.26 | 6.18 | 0.10 | 100 | 4.31 | 4.49 | 5.24 | 5.42 | 5.21 | 5.30 | 4.73 | 4.35 | 4.67 | 4.86 | 0.44 | 0 | 4.97E−04 | 1.33 | 2.5 |
| | 10674_st1 | | | | | | | | | | | | | | | | | | | | | |
| hsa-asg- | hsa-asg- | 6.77 | 6.85 | 7.07 | 6.90 | 0.16 | 100 | 5.68 | 5.25 | 6.12 | 6.30 | 5.59 | 5.60 | 5.35 | 5.06 | 5.20 | 5.57 | 0.42 | 11 | 4.03E−04 | 1.32 | 2.5 |
| 11181 | 11181_st1 | | | | | | | | | | | | | | | | | | | | | |
| hsa-asg- | hsa-asg- | 5.20 | 5.75 | 5.66 | 5.54 | 0.30 | 33 | 4.31 | 4.43 | 4.30 | 4.69 | 4.65 | 3.59 | 4.33 | 3.32 | 4.40 | 4.22 | 0.46 | 0 | 1.08E−03 | 1.31 | 2.5 |
| 7351 | 7351_st2 | | | | | | | | | | | | | | | | | | | | | |
| hsa-miR-96 | hsa-miR- | 4.46 | 3.95 | 5.35 | 4.59 | 0.71 | 33 | 4.99 | 3.42 | 3.06 | 3.01 | 4.11 | 2.85 | 3.05 | 1.88 | 3.09 | 3.27 | 0.86 | 11 | 4.00E−02 | 1.31 | 2.5 |
| | 96_st1 | | | | | | | | | | | | | | | | | | | | | |
| hsa-cand283 | hsa-cand283_st1 | 6.57 | 6.46 | 6.41 | 6.48 | 0.08 | 100 | 5.45 | 6.14 | 4.68 | 5.56 | 4.74 | 5.63 | 5.25 | 4.58 | 4.54 | 5.17 | 0.57 | 33 | 3.11E−03 | 1.31 | 2.5 |
| hsa-asg- | hsa-asg- | 5.81 | 5.49 | 5.24 | 5.51 | 0.29 | 100 | 5.32 | 4.16 | 4.12 | 4.49 | 4.00 | 3.87 | 4.14 | 3.44 | 4.32 | 4.21 | 0.51 | 11 | 2.07E−03 | 1.31 | 2.5 |
| 13905 | 13905_st1 | | | | | | | | | | | | | | | | | | | | | |
| hsa-asg-13471 | hsa-asg- | 5.66 | 5.87 | 6.26 | 5.93 | 0.30 | 100 | 4.76 | 4.76 | 4.39 | 5.12 | 5.35 | 5.40 | 4.38 | 4.07 | 3.53 | 4.64 | 0.61 | 11 | 6.58E−03 | 1.29 | 2.4 |
| | 13471_st1 | | | | | | | | | | | | | | | | | | | | | |
| hsa-asg- | hsa-asg-6543_st1 | 5.92 | 4.96 | 4.69 | 5.19 | 0.65 | 33 | 4.24 | 3.64 | 4.12 | 4.26 | 4.33 | 3.95 | 3.50 | 3.74 | 3.39 | 3.91 | 0.35 | 0 | 1.15E−03 | 1.28 | 2.4 |
| 6543 | | | | | | | | | | | | | | | | | | | | | | |
| hsa-asg- | hsa-asg- | 7.36 | 7.18 | 7.14 | 7.23 | 0.12 | 100 | 6.73 | 6.14 | 5.98 | 7.05 | 6.17 | 5.01 | 6.26 | 4.87 | 5.31 | 5.95 | 0.75 | 67 | 1.68E−02 | 1.28 | 2.4 |
| 4448 | 4448_st1 | | | | | | | | | | | | | | | | | | | | | |
| hsa-miR- | hsa-miR- | 13.7 | 13.5 | 13.61 | 13.6 | 0.08 | 100 | 12.7 | 12.1 | 12.4 | 12.9 | 12.4 | 11.8 | 12.1 | 11.6 | 12.5 | 12.3 | 0.43 | 100 | 5.88E−04 | 1.27 | 2.4 |
| 30d | 30d_st1 | | | | | | | | | | | | | | | | | | | | | |
| hsa-asg- | hsa-asg- | 13.0 | 12.7 | 12.79 | 12.8 | 0.20 | 100 | 12.2 | 11.9 | 11.2 | 12.2 | 12.0 | 11.4 | 11.3 | 10.4 | 11.4 | 11.6 | 0.58 | 100 | 4.88E−03 | 1.27 | 2.4 |
| 11199 | 11199_st2 | | | | | | | | | | | | | | | | | | | | | |
| hsa-asg- | hsa-asg- | 5.18 | 4.49 | 4.76 | 4.81 | 0.35 | 33 | 4.02 | 3.29 | 4.39 | 4.23 | 3.77 | 3.13 | 2.64 | 2.93 | 3.53 | 3.55 | 0.60 | 0 | 6.86E−03 | 1.26 | 2.4 |
| 1221_st2 | 1221_st2 | | | | | | | | | | | | | | | | | | | | | |
| hsa-miR- | hsa-miR- | 11.7 | 11.9 | 11.77 | 11.8 | 0.09 | 100 | 10.5 | 10.7 | 10.5 | 11.5 | 11.5 | 9.89 | 10.2 | 9.40 | 10.6 | 10.5 | 0.70 | 100 | 1.27E−02 | 1.26 | 2.4 |
| 199a | 199a_st2 | | | | | | | | | | | | | | | | | | | | | |
| hsa-miR- | hsa-miR- | 13.1 | 13.0 | 13.09 | 13.1 | 0.05 | 100 | 12.2 | 11.8 | 11.9 | 12.6 | 12.2 | 11.4 | 11.7 | 10.9 | 11.7 | 11.8 | 0.50 | 100 | 1.92E−03 | 1.24 | 2.4 |
| 99a | 99a_st2 | | | | | | | | | | | | | | | | | | | | | |
| hsa-asg- | hsa-asg- | 6.40 | 6.21 | 6.54 | 6.38 | 0.17 | 100 | 6.02 | 4.95 | 4.75 | 6.06 | 5.19 | 4.63 | 4.90 | 5.26 | 4.54 | 5.14 | 0.56 | 11 | 4.31E−03 | 1.24 | 2.4 |
| 510 | 510_st1 | | | | | | | | | | | | | | | | | | | | | |
| hsa-asg-10816 | hsa-asg- | 4.29 | 5.42 | 4.96 | 4.89 | 0.57 | 33 | 4.24 | 4.37 | 4.02 | 4.66 | 3.59 | 2.17 | 4.14 | 2.78 | 2.92 | 3.65 | 0.85 | 0 | 4.28E−02 | 1.24 | 2.4 |
| | 10816_st2 | | | | | | | | | | | | | | | | | | | | | |
| hsa-miR- | hsa-miR- | 12.5 | 12.1 | 12.33 | 12.3 | 0.18 | 100 | 12.0 | 11.0 | 11.2 | 11.7 | 11.3 | 10.5 | 11.2 | 9.98 | 10.9 | 11.1 | 0.61 | 100 | 7.22E−03 | 1.23 | 2.3 |
| 10a | 10a_st1 | | | | | | | | | | | | | | | | | | | | | |
| hsa-asg- | hsa-asg- | 6.33 | 6.10 | 5.56 | 6.00 | 0.39 | 100 | 4.94 | 4.30 | 5.19 | 5.19 | 4.89 | 4.65 | 4.27 | 4.47 | 5.05 | 4.77 | 0.36 | 100 | 5.55E−04 | 1.23 | 2.3 |
| 12471 | 12471_st1 | | | | | | | | | | | | | | | | | | | | | |
| hsa-asg- | hsa-asg- | 5.35 | 5.59 | 5.38 | 5.44 | 0.13 | 33 | 3.45 | 5.19 | 3.39 | 4.63 | 3.10 | 5.11 | 4.20 | 4.14 | 4.78 | 4.22 | 0.77 | 0 | 2.53E−02 | 1.21 | 2.3 |
| 3821 | 3821_st2 | | | | | | | | | | | | | | | | | | | | | |
| hsa-miR- | hsa-miR- | 13.4 | 13.4 | 13.37 | 13.4 | 0.05 | 100 | 13.1 | 12.2 | 12.2 | 13.1 | 12.6 | 11.8 | 11.7 | 11.1 | 11.9 | 12.2 | 0.65 | 100 | 1.12E−02 | 1.21 | 2.3 |
| 100 | 100_st2 | | | | | | | | | | | | | | | | | | | | | |
| hsa-asg- | hsa-asg-2967_st2 | 5.80 | 5.49 | 6.42 | 5.90 | 0.47 | 100 | 5.18 | 4.86 | 4.54 | 4.81 | 5.95 | 4.43 | 3.93 | 4.35 | 4.32 | 4.71 | 0.59 | 22 | 1.04E−02 | 1.20 | 2.3 |
| 2967 | | | | | | | | | | | | | | | | | | | | | | |
| hsa-miR- | hsa-miR- | 10.1 | 10.0 | 10.21 | 10.1 | 0.10 | 100 | 8.04 | 9.33 | 9.47 | 9.54 | 8.91 | 9.18 | 8.03 | 8.82 | 9.17 | 8.94 | 0.57 | 100 | 5.49E−03 | 1.20 | 2.3 |
| 34a | 34a_st1 | | | | | | | | | | | | | | | | | | | | | |
| hsa-miR-22 | hsa-miR- | 12.6 | 12.7 | 12.71 | 12.7 | 0.04 | 100 | 11.7 | 11.6 | 12.0 | 12.0 | 11.6 | 11.0 | 11.1 | 11.2 | 11.1 | 11.5 | 0.38 | 100 | 3.62E−04 | 1.19 | 2.3 |
| | 22_st1 | | | | | | | | | | | | | | | | | | | | | |
| hsa-asg- | hsa-asg- | 6.41 | 6.01 | 5.81 | 6.08 | 0.31 | 67 | 4.37 | 5.71 | 5.21 | 4.49 | 5.36 | 5.03 | 3.85 | 4.89 | 5.07 | 4.89 | 0.57 | 0 | 6.67E−03 | 1.19 | 2.3 |
| 11877 | 11877_st1 | | | | | | | | | | | | | | | | | | | | | |
| hsa-asg- | hsa-asg- | 7.46 | 6.85 | 6.77 | 7.03 | 0.38 | 100 | 6.30 | 5.77 | 6.23 | 6.49 | 5.95 | 4.84 | 5.80 | 4.68 | 6.48 | 5.84 | 0.67 | 78 | 1.66E−02 | 1.19 | 2.3 |
| 14146 | 14146_st1 | | | | | | | | | | | | | | | | | | | | | |
| hsa-asg- | hsa-asg- | 5.10 | 4.84 | 5.36 | 5.10 | 0.26 | 33 | 4.37 | 4.00 | 3.67 | 3.91 | 3.93 | 4.49 | 3.40 | 3.64 | 3.87 | 3.92 | 0.35 | 0 | 3.21E−04 | 1.18 | 2.3 |
| 10830 | 10830_st2 | | | | | | | | | | | | | | | | | | | | | |
| hsa- | hsa- | 4.94 | 5.20 | 6.02 | 5.39 | 0.56 | 67 | 4.76 | 5.04 | 3.54 | 4.71 | 5.15 | 4.18 | 2.64 | 3.99 | 3.97 | 4.22 | 0.80 | 11 | 4.40E−02 | 1.17 | 2.2 |
| cand330 | cand330_st2 | | | | | | | | | | | | | | | | | | | | | |
| hsa-asg- | hsa-asg- | 4.52 | 4.62 | 4.90 | 4.68 | 0.20 | 33 | 4.17 | 3.02 | 3.23 | 4.55 | 4.11 | 4.03 | 2.48 | 3.32 | 2.74 | 3.52 | 0.72 | 0 | 2.29E−02 | 1.16 | 2.2 |
| 4158 | 4158_st1 | | | | | | | | | | | | | | | | | | | | | |
| hsa-asg- | hsa-asg- | 5.45 | 5.46 | 4.64 | 5.18 | 0.47 | 67 | 5.03 | 3.42 | 3.67 | 4.49 | 4.63 | 4.18 | 3.17 | 3.54 | 4.16 | 4.03 | 0.62 | 11 | 1.54E−02 | 1.15 | 2.2 |
| 6803 | 6803_st1 | | | | | | | | | | | | | | | | | | | | | |
| hsa-miR- | hsa-miR- | 12.6 | 12.7 | 12.71 | 12.6 | 0.06 | 100 | 12.1 | 11.4 | 12.0 | 12.0 | 11.5 | 10.8 | 11.4 | 11.0 | 11.1 | 11.5 | 0.47 | 100 | 2.15E−03 | 1.15 | 2.2 |
| 106a | 106a_st1 | | | | | | | | | | | | | | | | | | | | | |
| hsa-miR- | hsa-miR- | 6.53 | 6.43 | 6.82 | 6.59 | 0.20 | 100 | 4.76 | 5.12 | 6.41 | 6.24 | 5.05 | 5.24 | 4.73 | 5.11 | 6.41 | 5.45 | 0.70 | 56 | 2.14E−02 | 1.14 | 2.2 |
| 34b | 34b_st2 | | | | | | | | | | | | | | | | | | | | | |
| hsa-miR- | hsa-miR- | 10.3 | 10.3 | 10.12 | 10.2 | 0.14 | 100 | 10.2 | 8.61 | 9.99 | 9.95 | 9.07 | 8.06 | 9.21 | 8.52 | 8.59 | 9.13 | 0.76 | 100 | 3.20E−02 | 1.14 | 2.2 |
| 197 | 197_st1 | | | | | | | | | | | | | | | | | | | | | |
| hsa-miR- | hsa-miR- | 12.1 | 12.4 | 12.40 | 12.3 | 0.15 | 100 | 11.6 | 11.6 | 11.2 | 11.9 | 11.5 | 11.6 | 11.1 | 10.1 | 10.0 | 11.2 | 0.68 | 100 | 1.86E−02 | 1.14 | 2.2 |
| 30c | 30c_st1 | | | | | | | | | | | | | | | | | | | | | |
| hsa- | hsa- | 9.77 | 9.49 | 9.26 | 9.51 | 0.25 | 100 | 8.90 | 8.31 | 8.71 | 8.69 | 8.14 | 7.82 | 7.95 | 8.41 | 8.42 | 8.37 | 0.36 | 100 | 5.48E−04 | 1.14 | 2.2 |
| miR102 | miR102_st2 | | | | | | | | | | | | | | | | | | | | | |
| hsa-asg- | hsa-asg- | 6.91 | 7.39 | 7.27 | 7.19 | 0.25 | 0 | 5.60 | 6.42 | 6.43 | 6.33 | 5.78 | 6.22 | 6.76 | 5.42 | 5.63 | 6.06 | 0.47 | 11 | 2.93E−03 | 1.13 | 2.2 |
| 8476 | 8476_st1 | | | | | | | | | | | | | | | | | | | | | |
| hsa-asg- | hsa-asg- | 6.23 | 6.53 | 6.34 | 6.37 | 0.15 | 100 | 5.62 | 4.76 | 5.71 | 5.53 | 5.68 | 5.20 | 4.78 | 5.19 | 4.73 | 5.24 | 0.41 | 22 | 1.12E−03 | 1.12 | 2.2 |
| 5827 | 5827_st2 | | | | | | | | | | | | | | | | | | | | | |
| hsa-miR- | hsa-miR- | 5.42 | 5.79 | 6.18 | 5.79 | 0.38 | 67 | 5.11 | 4.76 | 5.04 | 4.84 | 4.72 | 4.28 | 4.59 | 4.07 | 4.67 | 4.67 | 0.33 | 0 | 6.23E−04 | 1.12 | 2.2 |
| 624 | 624_st2 | | | | | | | | | | | | | | | | | | | | | |
| hsa-asg- | hsa-asg-3902_st1 | 4.97 | 5.56 | 5.77 | 5.43 | 0.41 | 67 | 4.94 | 4.55 | 4.30 | 5.19 | 4.45 | 4.03 | 4.14 | 3.20 | 4.07 | 4.32 | 0.58 | 0 | 1.24E−02 | 1.11 | 2.2 |
| 3902 | | | | | | | | | | | | | | | | | | | | | | |
| hsa-asg- | hsa-asg- | 6.72 | 6.46 | 6.38 | 6.52 | 0.18 | 100 | 5.68 | 4.81 | 5.71 | 5.77 | 5.54 | 5.01 | 5.12 | 5.29 | 5.78 | 5.41 | 0.36 | 22 | 5.64E−04 | 1.11 | 2.2 |
| 3798 | 3798_st1 | | | | | | | | | | | | | | | | | | | | | |
| hsa-miR- | hsa-miR- | 9.89 | 9.77 | 10.50 | 10.0 | 0.39 | 100 | 9.83 | 9.37 | 8.91 | 9.35 | 8.95 | 8.34 | 8.55 | 8.21 | 9.05 | 8.95 | 0.52 | 100 | 7.81E−03 | 1.11 | 2.2 |
| 194 | 194_st2 | | | | | | | | | | | | | | | | | | | | | |
| hsa-asg- | hsa-asg- | 6.02 | 5.82 | 6.63 | 6.16 | 0.43 | 67 | 5.65 | 5.51 | 3.31 | 4.93 | 5.49 | 5.24 | 4.78 | 5.31 | 5.29 | 5.05 | 0.71 | 0 | 3.16E−02 | 1.10 | 2.1 |
| 13661 | 13661_st1 | | | | | | | | | | | | | | | | | | | | | |
| hsa-asg- | hsa-asg-11883_st1 | 7.05 | 7.27 | 7.21 | 7.18 | 0.12 | 100 | 5.92 | 6.06 | 6.67 | 6.74 | 6.18 | 6.02 | 6.12 | 4.58 | 6.44 | 6.08 | 0.63 | 78 | 1.60E−02 | 1.10 | 2.1 |
| 11883 | | | | | | | | | | | | | | | | | | | | | | |
| hsa-miR- | hsa-miR- | 13.0 | 13.0 | 13.04 | 13.0 | 0.01 | 100 | 12.4 | 11.9 | 12.5 | 12.3 | 11.8 | 11.2 | 11.9 | 11.4 | 11.6 | 11.9 | 0.44 | 100 | 1.97E−03 | 1.10 | 2.1 |
| 17-5p | 17-5p_st1 | | | | | | | | | | | | | | | | | | | | | |
| hsa-asg- | hsa-asg- | 7.12 | 6.21 | 7.43 | 6.92 | 0.63 | 100 | 6.80 | 6.02 | 5.45 | 6.11 | 5.42 | 5.17 | 5.51 | 5.79 | 6.12 | 5.82 | 0.50 | 56 | 1.11E−02 | 1.10 | 2.1 |
| 6138 | 6138_st1 | | | | | | | | | | | | | | | | | | | | | |
| hsa-miR- | hsa-miR- | 13.7 | 13.7 | 13.59 | 13.6 | 0.09 | 100 | 13.1 | 12.9 | 12.4 | 13.1 | 12.8 | 12.3 | 12.4 | 11.8 | 12.2 | 12.6 | 0.43 | 100 | 1.79E−03 | 1.09 | 2.1 |
| 143 | 143_st2 | | | | | | | | | | | | | | | | | | | | | |
| hsa- | hsa- | 5.08 | 4.89 | 5.49 | 5.15 | 0.31 | 33 | 4.55 | 4.49 | 3.91 | 4.15 | 3.44 | 4.24 | 2.92 | 3.83 | 5.05 | 4.06 | 0.63 | 11 | 1.88E−02 | 1.09 | 2.1 |
| cand190 | cand190_st1 | | | | | | | | | | | | | | | | | | | | | |
| hsa-asg- | hsa-asg- | 6.91 | 6.06 | 6.43 | 6.46 | 0.43 | 100 | 5.87 | 6.49 | 4.17 | 5.04 | 4.99 | 6.07 | 5.09 | 5.06 | 5.64 | 5.38 | 0.70 | 0 | 3.28E−02 | 1.08 | 2.1 |
| 7118 | 7118_st1 | | | | | | | | | | | | | | | | | | | | | |
| hsa-miR- | hsa-miR- | 7.60 | 7.88 | 7.61 | 7.70 | 0.16 | 100 | 6.51 | 5.65 | 6.84 | 7.08 | 7.11 | 6.71 | 6.11 | 6.48 | 7.02 | 6.61 | 0.49 | 89 | 4.24E−03 | 1.08 | 2.1 |
| 210 | 210_st1 | | | | | | | | | | | | | | | | | | | | | |
| hsa-asg- | hsa-asg-12765_st2 | 6.71 | 6.58 | 6.30 | 6.53 | 0.21 | 100 | 5.75 | 5.89 | 5.45 | 6.07 | 5.46 | 5.20 | 5.46 | 4.96 | 4.78 | 5.45 | 0.42 | 33 | 1.85E−03 | 1.08 | 2.1 |
| 12765 | | | | | | | | | | | | | | | | | | | | | | |
| hsa-miR- | hsa-miR- | 12.7 | 12.4 | 12.51 | 12.5 | 0.12 | 100 | 11.7 | 11.6 | 11.2 | 12.0 | 11.7 | 11.7 | 11.1 | 10.9 | 11.1 | 11.4 | 0.37 | 100 | 7.33E−04 | 1.08 | 2.1 |
| 361 | 361_st2 | | | | | | | | | | | | | | | | | | | | | |
| hsa-asg- | hsa-asg- | 5.16 | 5.32 | 4.82 | 5.10 | 0.25 | 67 | 4.66 | 3.74 | 4.47 | 4.71 | 5.19 | 2.69 | 3.40 | 3.74 | 3.65 | 4.03 | 0.78 | 0 | 4.65E−02 | 1.07 | 2.1 |
| 10513 | 10513_st1 | | | | | | | | | | | | | | | | | | | | | |
| hsa-asg- | hsa-asg- | 4.90 | 5.03 | 5.02 | 4.98 | 0.07 | 67 | 3.93 | 3.83 | 3.79 | 4.69 | 4.30 | 3.78 | 3.85 | 3.49 | 3.65 | 3.92 | 0.36 | 0 | 6.26E−04 | 1.06 | 2.1 |
| 3055 | 3055_st2 | | | | | | | | | | | | | | | | | | | | | |
| hsa-asg- | hsa-asg- | 5.45 | 5.52 | 5.43 | 5.47 | 0.05 | 100 | 4.85 | 4.30 | 4.87 | 4.30 | 4.89 | 3.48 | 4.69 | 4.07 | 4.24 | 4.41 | 0.47 | 0 | 3.55E−03 | 1.06 | 2.1 |
| 5695 | 5695_st2 | | | | | | | | | | | | | | | | | | | | | |
| hsa-miR- | hsa-miR- | 11.8 | 12.1 | 12.11 | 12.0 | 0.16 | 100 | 11.6 | 1.2 | 1.1 | 11.5 | 11.1 | 10.9 | 10.9 | 10.0 | 9.96 | 10.9 | 0.58 | 100 | 1.35E−02 | 1.05 | 2.1 |
| 30b | 30b_st2 | | | | | | | | | | | | | | | | | | | | | |
| hsa-miR- | hsa-miR- | 13.3 | 13.4 | 13.33 | 13.4 | 0.08 | 100 | 12.6 | 12.2 | 12.1 | 12.8 | 12.3 | 11.9 | 12.1 | 12.1 | 12.3 | 12.3 | 0.30 | 100 | 1.77E−04 | 1.04 | 2.1 |
| 221 | 221_st1 | | | | | | | | | | | | | | | | | | | | | |
| hsa-asg-14048 | hsa-asg- | 5.29 | 4.79 | 5.93 | 5.34 | 0.57 | 67 | 4.43 | 4.95 | 3.54 | 3.63 | 5.03 | 3.26 | 4.59 | 5.15 | 4.07 | 4.29 | 0.70 | 0 | 4.42E−02 | 1.04 | 2.1 |
| | 14048_st1 | | | | | | | | | | | | | | | | | | | | | |
| hsa-asg- | hsa-asg- | 5.18 | 4.94 | 5.55 | 5.22 | 0.31 | 33 | 3.56 | 3.47 | 4.43 | 4.58 | 4.11 | 3.37 | 4.00 | 5.58 | 4.57 | 4.18 | 0.70 | 0 | 3.50E−02 | 1.04 | 2.1 |
| 4441 | 4441_st1 | | | | | | | | | | | | | | | | | | | | | |
| hsa-asg- | hsa-asg-10081_st1 | 5.82 | 5.97 | 5.51 | 5.77 | 0.23 | 100 | 5.75 | 4.30 | 4.47 | 5.34 | 5.12 | 3.95 | 4.94 | 4.47 | 4.24 | 4.73 | 0.59 | 11 | 1.60E−02 | 1.04 | 2.1 |
| 10081 | | | | | | | | | | | | | | | | | | | | | | |
| hsa-asg- | hsa-asg- | 7.78 | 7.52 | 7.98 | 7.76 | 0.23 | 67 | 6.79 | 6.98 | 7.19 | 7.29 | 6.98 | 6.52 | 6.22 | 6.32 | 6.27 | 6.73 | 0.41 | 22 | 2.26E−03 | 1.03 | 2.0 |
| 12346 | 12346_st2 | | | | | | | | | | | | | | | | | | | | | |
| hsa-asg- | hsa-asg- | 6.71 | 6.51 | 6.29 | 6.50 | 0.21 | 100 | 5.57 | 5.74 | 5.71 | 5.86 | 5.24 | 4.97 | 5.12 | 5.62 | 5.42 | 5.47 | 0.30 | 33 | 3.12E−04 | 1.03 | 2.0 |
| 2365 | 2365_st1 | | | | | | | | | | | | | | | | | | | | | |
| hsa-asg- | hsa-asg- | 3.12 | 2.81 | 4.21 | 3.38 | 0.73 | 33 | 3.21 | 2.87 | 2.18 | 2.85 | 2.01 | 2.17 | 1.08 | 1.88 | 2.92 | 2.35 | 0.67 | 0 | 4.80E−02 | 1.03 | 2.0 |
| 1947 | 1947_st1 | | | | | | | | | | | | | | | | | | | | | |
| hsa-let-7e | hsa-let- | 13.4 | 13.2 | 13.21 | 13.3 | 0.15 | 100 | 12.6 | 12.8 | 12.3 | 12.6 | 12.3 | 12.6 | 12.0 | 11.3 | 11.8 | 12.2 | 0.48 | 100 | 5.63E−03 | 1.02 | 2.0 |
| | 7e_st1 | | | | | | | | | | | | | | | | | | | | | |
| hsa-asg- | hsa-asg- | 6.59 | 6.55 | 6.52 | 6.55 | 0.04 | 100 | 5.68 | 5.72 | 5.28 | 6.14 | 6.02 | 4.75 | 6.19 | 4.87 | 5.23 | 5.54 | 0.54 | 56 | 1.00E−02 | 1.01 | 2.0 |
| 13086 | 13086_st1 | | | | | | | | | | | | | | | | | | | | | |
| hsa-asg- | hsa-asg- | 4.17 | 5.03 | 5.35 | 4.85 | 0.61 | 33 | 3.93 | 4.08 | 4.21 | 4.08 | 4.11 | 3.48 | 4.00 | 3.74 | 2.92 | 3.84 | 0.41 | 0 | 7.66E−03 | 1.01 | 2.0 |
| 14008 | 14008_st2 | | | | | | | | | | | | | | | | | | | | | |
| hsa-asg- | hsa-asg- | 6.45 | 6.35 | 6.18 | 6.33 | 0.14 | 100 | 6.16 | 5.04 | 5.45 | 5.68 | 5.39 | 4.93 | 4.82 | 5.04 | 5.35 | 5.32 | 0.42 | 11 | 2.70E−03 | 1.01 | 2.0 |
| 12179 | 12179_st1 | | | | | | | | | | | | | | | | | | | | | |
| hsa-asg- | hsa-asg- | 8.02 | 7.39 | 8.42 | 7.94 | 0.52 | 100 | 7.52 | 7.52 | 6.10 | 6.92 | 7.19 | 6.82 | 6.60 | 6.86 | 6.89 | 6.94 | 0.44 | 89 | 8.30E−03 | 1.01 | 2.0 |
| 3340 | 3340_st2 | | | | | | | | | | | | | | | | | | | | | |
| hsa-asg- | hsa-asg-13350_st2 | 9.73 | 9.16 | 10.01 | 9.63 | 0.44 | 100 | 9.29 | 9.08 | 8.31 | 8.84 | 8.61 | 8.88 | 8.30 | 8.27 | 8.07 | 8.63 | 0.42 | 44 | 5.00E−03 | 1.01 | 2.0 |
| 13350 | | | | | | | | | | | | | | | | | | | | | | |
| hsa-asg- | hsa-asg- | 6.60 | 7.19 | 6.85 | 6.88 | 0.30 | 100 | 5.87 | 6.55 | 4.78 | 6.21 | 6.10 | 6.92 | 4.90 | 5.92 | 5.64 | 5.88 | 0.70 | 33 | 4.05E−02 | 1.00 | 2.0 |
| 9053 | 9053_st1 | | | | | | | | | | | | | | | | | | | | | |

SD, standard deviation;
%, percentage of samples expressing miRNA above background levels;
Log2Diff, difference in VSN-transformed expression between NBL and LNneg samples.

### Example 21

### miRNAs Differentally Expressed Between Normal Esophagus Tissue and Normal Lymph Nodes

[0301] To identify miRNAs that may be useful markers for metastasis of cancerous esophagus cells to lymph nodes, the inventors identified miRNAs that are expressed at significantly higher levels in normal esophagus tissue than in cancer-negative lymph nodes.

[0302] Total RNA, purified from three separate normal human esophagus tissue samples (FirstChoice® Human Esophagus Total RNA, cat. no. AM6842; Ambion, Austin, Tex., USA) and from nine normal human lymph node samples (FirstChoice® Human Lymph Node Total RNA, cat. no. AM7894; Ambion, Austin, Tex., USA) was purchased from Ambion. miRNA purification and labeling and microarray expression analyses were performed as described above in Example 2.

[0303] The inventors identified 238 miRNAs (93 verified, 145 predicted) with significant differential expression between normal esophagus tissue samples and normal lymph nodes (log 2Diff esophagus vs LN neg≧1 and p-value<0.05) (Table 20). Among the verified miRNAs, hsa-miR-205, -206 and -187 had average expression levels that were more than 100-fold higher in esophagus samples than in normal lymph node samples; hsa-miR-203, -133b, and -429 had average expression levels that were more than 50-fold higher in esophagus samples, 10 additional miRNAs had average expression levels that were between 10- and 50-fold higher in esophagus samples; and 22 other miRNAs had average expression levels that were between 5- and 10-fold higher in esophagus samples. Among the predicted miRNAs, hsa-asg-8428_st2 and -14153_st2 had average expression levels that were over 20-fold higher in esophagus samples than in normal lymph nodes. Seven miRNAs had average expression levels that were between 10- and 20-fold higher in esophagus compared to lymph node samples.

TABLE 20
MicroRNAs Differentially Expressed Between Normal Esophagus Samples (ESO) and Cancer-Negative Lymph Node
Samples (LNneg) from Patients.

| | | ESO | | | | | | LNneg | | | | | | | | | | | | | | |
|---|---|---|---|---|---|---|---|---|---|---|---|---|---|---|---|---|---|---|---|---|---|---|
| MicroRNA | Probe ID | 1 | 2 | 3 | M | SD | % | 1 | 2 | 3 | 4 | 5 | 6 | 7 | 8 | 9 | M | SD | % | ttest | log2Diff | Fold |
| hsa-miR-205 | hsa-miR-205_st1 | 13.3 | 13.4 | 13.2 | 13.3 | 0.08 | 100 | 5.64 | 2.03 | 3.59 | 6.11 | 3.40 | 5.32 | 7.76 | 2.93 | 5.91 | 2.56 | 0.80 | 0 | 1.45E−05 | 8.61 | 389 |
| hsa-miR-206 | hsa-miR-206_st2 | 12.4 | 13.0 | 12.7 | 12.7 | 0.33 | 100 | 1.92 | 9.39 | 3.97 | 5.85 | 8.46 | 4.47 | 5.00 | 4.09 | 4.99 | 2.40 | 0.96 | 0 | 3.14E−04 | 7.40 | 169 |
| hsa-miR-187 | hsa-miR-187_st1 | 10.1 | 9.97 | 10.8 | 10.3 | 0.46 | 100 | 2.76 | 3.77 | 3.22 | 3.37 | 3.05 | 3.38 | 3.17 | 4.76 | 2.79 | 4.25 | 0.73 | 22 | 6.23E−09 | 6.95 | 123 |
| hsa-miR-203 | hsa-miR-203_st2 | 13.4 | 13.4 | 13.4 | 13.4 | 0.02 | 100 | 7.21 | 8.24 | 6.45 | 5.41 | 5.19 | 6.07 | 9.36 | 7.33 | 5.89 | 6.13 | 0.74 | 56 | 1.07E−05 | 6.62 | 98.3 |
| hsa-miR-133b | hsa-miR-133b_st2 | 12.1 | 12.6 | 12.5 | 12.4 | 0.27 | 100 | 4.47 | 10.1 | 7.45 | 6.20 | 7.22 | 4.47 | 5.39 | 7.36 | 6.22 | 4.24 | 0.31 | 0 | 2.53E−04 | 5.90 | 59.5 |
| hsa-miR-429 | hsa-miR-429_st1 | 8.64 | 8.37 | 8.70 | 8.57 | 0.18 | 100 | 3.67 | 2.13 | 2.37 | 2.69 | 2.32 | 2.45 | 5.39 | 3.45 | 1.54 | 6.66 | 0.51 | 78 | 8.14E−06 | 5.68 | 51.3 |
| hsa-miR-133a | hsa-miR-133a_st1 | 12.8 | 13.0 | 13.0 | 12.9 | 0.15 | 100 | 5.92 | 10.8 | 8.19 | 7.14 | 8.22 | 6.25 | 6.48 | 7.77 | 7.70 | 4.89 | 0.62 | 44 | 1.12E−04 | 5.36 | 41.0 |
| hsa-miR-375 | hsa-miR-375_st1 | 10.1 | 10.6 | 7.21 | 9.34 | 1.86 | 67 | 6.23 | 2.85 | 2.97 | 3.69 | 0.99 | 4.63 | 6.39 | 5.96 | 4.93 | 5.36 | 0.70 | 44 | 2.01E−03 | 5.05 | 33.1 |
| hsa-miR-200b | hsa-miR-200b_st1 | 12.6 | 12.6 | 12.6 | 12.6 | 0.03 | 100 | 8.90 | 6.69 | 6.82 | 6.87 | 6.51 | 7.65 | 10.4 | 7.62 | 7.80 | 5.77 | 0.34 | 78 | 6.41E−05 | 4.94 | 30.7 |
| hsa-miR-499 | hsa-miR12_st1 | 9.45 | 9.72 | 9.72 | 9.63 | 0.16 | 100 | 5.37 | 6.66 | 4.11 | 4.43 | 4.82 | 4.58 | 3.87 | 5.45 | 4.81 | 6.05 | 0.32 | 100 | 2.79E−06 | 4.73 | 26.5 |
| hsa-miR-499 | hsa-miR-499_st1 | 9.20 | 9.47 | 9.54 | 9.40 | 0.18 | 100 | 4.75 | 6.58 | 4.53 | 4.18 | 5.05 | 4.28 | 4.60 | 5.32 | 4.66 | 3.29 | 0.98 | 0 | 1.17E−06 | 4.52 | 23.0 |
| hsa-asg-8428 | hsa-asg-8428_st2 | 6.24 | 6.50 | 6.54 | 6.43 | 0.16 | 100 | 2.66 | 2.03 | 2.53 | 1.01 | 0.02 | 2.17 | 1.62 | 2.25 | 1.96 | 5.18 | 0.55 | 11 | 3.12E−06 | 4.62 | 24.6 |
| hsa-asg-14153 | hsa-asg-14153_st2 | 7.00 | 7.60 | 7.04 | 7.21 | 0.34 | 33 | 3.06 | 3.01 | 2.37 | 2.69 | 1.16 | 2.78 | 4.40 | 3.07 | 2.26 | 4.36 | 0.51 | 11 | 6.54E−06 | 4.46 | 22.0 |
| hsa-miR-200c | hsa-miR-200c_st1 | 13.3 | 13.5 | 13.5 | 13.4 | 0.11 | 100 | 10.3 | 8.18 | 8.15 | 8.14 | 7.98 | 8.89 | 11.5 | 9.60 | 8.84 | 5.10 | 0.41 | 78 | 1.21E−04 | 4.37 | 20.7 |
| hsa-asg-9198 | hsa-asg-9198_st1 | 5.24 | 6.28 | 6.20 | 5.91 | 0.58 | 100 | 1.39 | 1.11 | 2.11 | 1.78 | 1.60 | 1.11 | 1.86 | 2.05 | 1.54 | 5.62 | 0.29 | 33 | 2.76E−08 | 4.29 | 19.6 |
| hsa-miR-200a | hsa-miR-200a_st2 | 10.0 | 9.82 | 9.46 | 9.77 | 0.29 | 100 | 6.49 | 5.72 | 5.29 | 4.60 | 4.07 | 4.78 | 7.78 | 6.27 | 5.08 | 7.47 | 0.36 | 100 | 1.08E−04 | 4.21 | 18.5 |
| hsa-miR-576 | hsa-miR-576_st2 | 6.69 | 6.23 | 6.57 | 6.50 | 0.24 | 100 | 3.06 | 1.72 | 2.01 | 1.97 | 1.97 | 2.08 | 3.09 | 2.25 | 2.87 | 6.92 | 0.63 | 100 | 1.42E−07 | 4.16 | 17.9 |
| hsa-asg-1794 | hsa-asg-1794_st1 | 5.88 | 5.95 | 5.96 | 5.93 | 0.04 | 100 | 2.66 | 1.72 | 2.19 | 1.01 | 2.15 | 1.48 | 2.92 | 1.85 | 1.96 | 3.62 | 0.65 | 56 | 4.81E−07 | 3.93 | 15.3 |
| hsa-asg-924 | hsa-asg-924_st1 | 7.79 | 7.42 | 6.57 | 7.26 | 0.62 | 100 | 3.39 | 4.46 | 2.69 | 2.77 | 2.15 | 2.78 | 3.53 | 4.66 | 4.30 | 4.14 | 0.53 | 0 | 4.64E−05 | 3.85 | 14.4 |
| hsa-miR-605 | hsa-miR-605_st1 | 6.10 | 6.36 | 6.51 | 6.32 | 0.21 | 100 | 3.06 | 0.75 | 1.74 | 2.17 | 2.92 | 3.07 | 4.47 | 2.61 | 2.16 | 6.92 | 0.78 | 89 | 1.17E−04 | 3.77 | 13.7 |
| hsa-asg-2027 | hsa-asg-2027_st1 | 7.53 | 7.46 | 7.83 | 7.60 | 0.20 | 100 | 1.66 | 5.23 | 4.47 | 4.24 | 4.27 | 4.21 | 4.54 | 3.56 | 3.53 | 3.36 | 1.04 | 0 | 1.26E−04 | 3.64 | 12.4 |
| hsa-asg-5602 | hsa-asg-5602_st2 | 7.58 | 6.95 | 7.66 | 7.40 | 0.39 | 33 | 3.79 | 6.15 | 4.68 | 3.37 | 3.73 | 1.48 | 3.77 | 3.56 | 3.47 | 6.02 | 0.53 | 89 | 6.21E−04 | 3.62 | 12.3 |
| hsa-asg-2345 | hsa-asg-2345_st2 | 6.15 | 5.88 | 5.59 | 5.88 | 0.28 | 100 | 2.43 | 3.63 | 1.46 | 2.53 | 3.17 | 2.62 | 1.38 | 1.65 | 2.54 | 5.60 | 0.58 | 33 | 1.95E−05 | 3.50 | 11.3 |
| hsa-miR-338 | hsa-miR-338_st1 | 8.01 | 7.59 | 7.82 | 7.81 | 0.21 | 100 | 5.57 | 4.86 | 4.04 | 2.17 | 4.78 | 3.44 | 4.89 | 5.11 | 4.08 | 5.53 | 0.75 | 33 | 2.22E−04 | 3.48 | 11.2 |
| hsa-asg-7637 | hsa-asg-7637_st2 | 6.72 | 7.75 | 7.20 | 7.22 | 0.51 | 100 | 4.47 | 3.46 | 3.93 | 4.03 | 3.29 | 3.64 | 5.27 | 3.66 | 2.54 | 4.93 | 0.65 | 56 | 3.29E−05 | 3.41 | 10.7 |
| hsa-miR-189 | hsa-miR-189_st1 | 8.97 | 8.29 | 9.02 | 8.76 | 0.41 | 100 | 4.93 | 7.23 | 6.18 | 4.55 | 4.94 | 3.54 | 4.95 | 6.08 | 5.79 | 7.94 | 0.77 | 100 | 4.12E−04 | 3.41 | 10.6 |
| hsa-asg-11715 | hsa-asg-11715_st2 | 5.34 | 5.84 | 4.46 | 5.21 | 0.70 | 67 | 2.18 | 1.51 | 2.11 | 1.78 | 0.62 | 1.48 | 3.39 | 1.85 | 2.36 | 3.81 | 0.89 | 0 | 5.77E−05 | 3.29 | 9.8 |
| hsa-miR-378 | hsa-miR-378_st1 | 7.29 | 7.56 | 7.76 | 7.53 | 0.24 | 100 | 4.84 | 6.39 | 5.46 | 2.17 | 6.16 | 3.59 | 0.63 | 4.71 | 4.46 | 8.06 | 0.77 | 100 | 1.54E−02 | 3.27 | 9.6 |
| hsa-asg-791 | hsa-asg-791_st1 | 5.29 | 5.11 | 5.35 | 5.25 | 0.13 | 0 | 1.66 | 2.03 | 2.19 | 2.44 | 0.48 | 1.48 | 2.54 | 2.25 | 3.02 | 4.64 | 0.97 | 22 | 2.43E−05 | 3.24 | 9.4 |
| hsa-asg-10131 | hsa-asg-10131_st2 | 6.44 | 6.12 | 6.78 | 6.45 | 0.33 | 100 | 3.54 | 2.51 | 2.53 | 3.26 | 2.64 | 3.20 | 5.09 | 3.33 | 3.16 | 8.46 | 0.92 | 100 | 5.45E−05 | 3.20 | 9.2 |
| hsa-asg-10393 | hsa-asg-10393_st1 | 5.40 | 6.24 | 6.02 | 5.89 | 0.44 | 67 | 2.43 | 3.91 | 2.83 | 2.85 | 1.79 | 3.54 | 2.54 | 2.78 | 1.54 | 5.57 | 0.46 | 22 | 4.36E−05 | 3.20 | 9.2 |
| hsa-asg- | hsa-asg-12142_st1 | 5.43 | 5.49 | 5.59 | 5.50 | 0.08 | 100 | 2.18 | 3.52 | 1.83 | 1.78 | 2.78 | 1.11 | 2.33 | 2.61 | 2.71 | 11.0 | 0.65 | 100 | 1.78E−05 | 3.19 | 9.1 |
| 12142 | | | | | | | | | | | | | | | | | | | | | | |
| hsa-asg-1826 | hsa-asg-1826_st2 | 5.62 | 6.16 | 5.86 | 5.88 | 0.27 | 100 | 2.18 | 3.57 | 2.53 | 2.17 | 2.92 | 3.13 | 1.86 | 3.33 | 3.02 | 5.94 | 1.24 | 67 | 5.58E−06 | 3.13 | 8.8 |
| hsa-asg- | hsa-asg-11380_st2 | 5.74 | 5.84 | 5.23 | 5.60 | 0.33 | 100 | 3.06 | 2.51 | 2.19 | 1.97 | 2.48 | 2.27 | 3.09 | 2.93 | 1.75 | 4.08 | 1.08 | 22 | 1.12E−06 | 3.13 | 8.8 |
| 11380 | | | | | | | | | | | | | | | | | | | | | | |
| hsa-asg- | hsa-asg-13997_st2 | 5.31 | 5.82 | 5.66 | 5.60 | 0.26 | 100 | 2.18 | 3.01 | 2.19 | 2.35 | 1.25 | 3.20 | 2.33 | 3.07 | 3.29 | 4.73 | 0.59 | 11 | 1.85E−05 | 3.05 | 8.3 |
| 13997 | | | | | | | | | | | | | | | | | | | | | | |
| hsa-miR-141 | hsa-miR-141_st1 | 7.60 | 7.09 | 6.96 | 7.22 | 0.34 | 100 | 4.93 | 4.43 | 4.39 | 2.85 | 3.85 | 3.83 | 4.54 | 5.07 | 3.83 | 4.65 | 0.35 | 0 | 2.80E−05 | 3.03 | 8.1 |
| hsa-miR-149 | hsa-miR-149_st2 | 6.04 | 5.86 | 6.25 | 6.05 | 0.20 | 33 | 1.79 | 4.15 | 2.76 | 1.48 | 2.48 | 3.38 | 3.17 | 4.49 | 3.87 | 4.64 | 0.77 | 11 | 7.00E−04 | 2.99 | 7.9 |
| hsa-asg-3910 | hsa-asg-3910_st2 | 6.14 | 5.94 | 5.75 | 5.94 | 0.19 | 100 | 2.86 | 4.33 | 3.39 | 2.69 | 1.79 | 1.48 | 3.65 | 3.56 | 2.87 | 3.64 | 0.86 | 0 | 2.59E−04 | 2.99 | 7.9 |
| hsa-miR-561 | hsa-miR-561_st1 | 5.77 | 4.58 | 5.20 | 5.18 | 0.59 | 33 | 3.67 | 2.13 | 1.64 | 2.35 | 2.32 | 2.27 | 2.54 | 1.25 | 1.75 | 7.77 | 0.51 | 100 | 5.46E−05 | 2.97 | 7.8 |
| Has-cand26 | hsa-cand26_st2 | 7.73 | 8.12 | 8.04 | 7.97 | 0.21 | 100 | 6.03 | 4.08 | 3.68 | 4.75 | 5.29 | 4.07 | 5.46 | 6.12 | 5.61 | 4.70 | 0.27 | 11 | 2.78E−04 | 2.96 | 7.8 |
| hsa-miR-495 | hsa-miR-495_st1 | 8.08 | 8.19 | 8.36 | 8.21 | 0.14 | 100 | 6.97 | 6.26 | 6.32 | 4.43 | 5.16 | 2.45 | 4.89 | 6.02 | 4.81 | 5.49 | 0.60 | 33 | 4.32E−03 | 2.95 | 7.8 |
| hsa-miR-31 | hsa-miR-31_st2 | 12.6 | 11.9 | 11.9 | 12.1 | 0.39 | 100 | 8.95 | 10.1 | 8.71 | 8.60 | 7.73 | 8.68 | 10.1 | 10.4 | 9.79 | 3.36 | 0.96 | 0 | 3.53E−04 | 2.94 | 7.7 |
| hsa-asg- | hsa-asg-13705_st1 | 5.07 | 5.25 | 5.35 | 5.22 | 0.14 | 67 | 3.79 | 2.33 | 2.69 | 2.35 | 0.35 | 3.20 | 3.25 | 1.65 | 0.95 | 4.14 | 0.38 | 0 | 1.40E−03 | 2.94 | 7.7 |
| 13705 | | | | | | | | | | | | | | | | | | | | | | |
| hsa-asg- | hsa-asg-13135_st1 | 7.83 | 8.10 | 8.25 | 8.06 | 0.21 | 100 | 5.24 | 4.91 | 4.79 | 4.75 | 5.16 | 4.47 | 5.60 | 5.62 | 5.67 | 3.47 | 0.47 | 0 | 6.64E−07 | 2.93 | 7.6 |
| 13135 | | | | | | | | | | | | | | | | | | | | | | |
| hsa-asg-9723 | hsa-asg-9723_st2 | 4.64 | 5.49 | 6.07 | 5.40 | 0.72 | 67 | 2.86 | 2.60 | 1.11 | 2.17 | 2.32 | 3.69 | 2.10 | 2.61 | 2.87 | 4.49 | 0.42 | 0 | 1.03E−04 | 2.92 | 7.6 |
| hsa-asg- | hsa-asg-12753_st1 | 5.07 | 5.52 | 5.02 | 5.20 | 0.27 | 67 | 2.86 | 1.51 | 3.10 | 2.17 | 2.64 | 2.45 | 1.86 | 1.85 | 2.36 | 2.41 | 0.68 | 0 | 3.79E−06 | 2.89 | 7.4 |
| 12753 | | | | | | | | | | | | | | | | | | | | | | |
| hsa-asg- | hsa-asg-10247_st1 | 5.03 | 5.63 | 5.49 | 5.38 | 0.31 | 33 | 4.02 | 1.72 | 2.19 | 2.35 | 0.35 | 3.20 | 3.97 | 2.78 | 2.16 | 7.42 | 0.88 | 100 | 2.00E−03 | 2.85 | 7.2 |
| 10247 | | | | | | | | | | | | | | | | | | | | | | |
| hsa-miR-493- | hsa-miR-493- | 7.40 | 7.33 | 7.86 | 7.53 | 0.29 | 100 | 6.88 | 6.18 | 6.33 | 3.69 | 4.38 | 1.88 | 4.60 | 4.37 | 3.83 | 3.83 | 0.53 | 0 | 1.24E−02 | 2.85 | 7.2 |
| 5p | 5p_st1 | | | | | | | | | | | | | | | | | | | | | |
| hsa-asg-6178 | hsa-asg-6178_st2 | 4.73 | 4.99 | 5.71 | 5.14 | 0.51 | 33 | 2.43 | 3.82 | 2.19 | 1.19 | 0.76 | 2.27 | 2.33 | 2.43 | 3.42 | 5.26 | 1.04 | 22 | 6.87E−04 | 2.83 | 7.1 |
| hsa-asg-1765 | hsa-asg-1765_st1 | 5.43 | 5.86 | 4.95 | 5.41 | 0.46 | 67 | 2.86 | 3.63 | 2.37 | 2.35 | 3.29 | 2.27 | 2.10 | 2.25 | 2.16 | 3.11 | 1.22 | 0 | 1.16E−05 | 2.83 | 7.1 |
| hsa-asg-1587 | hsa-asg-1587_st1 | 5.37 | 5.31 | 5.13 | 5.27 | 0.13 | 67 | 3.06 | 1.51 | 3.10 | 2.35 | 2.78 | 2.45 | 2.54 | 2.25 | 1.96 | 4.73 | 0.52 | 0 | 3.33E−06 | 2.83 | 7.1 |
| hsa-asg-8054 | hsa-asg-8054_st1 | 5.46 | 4.95 | 4.65 | 5.02 | 0.41 | 33 | 1.39 | 1.72 | 2.37 | 1.19 | 3.05 | 2.08 | 2.54 | 3.45 | 2.36 | 5.39 | 0.42 | 44 | 1.15E−04 | 2.78 | 6.9 |
| hsa-asg-5617 | hsa-asg-5617_st1 | 5.67 | 5.46 | 5.57 | 5.57 | 0.10 | 100 | 3.91 | 3.63 | 3.44 | 2.69 | 1.42 | 1.48 | 1.62 | 3.76 | 3.29 | 6.24 | 0.52 | 44 | 1.17E−03 | 2.76 | 6.8 |
| hsa-miR-411 | hsa-miR-411_st1 | 6.77 | 6.01 | 6.99 | 6.59 | 0.52 | 100 | 4.54 | 5.23 | 5.56 | 2.99 | 3.40 | 2.27 | 2.10 | 4.85 | 3.74 | 5.14 | 0.48 | 22 | 5.26E−03 | 2.74 | 6.7 |
| hsa-asg-3822 | hsa-asg-3822_st2 | 5.73 | 5.33 | 5.29 | 5.45 | 0.25 | 33 | 3.67 | 2.03 | 2.45 | 2.17 | 1.60 | 2.93 | 4.78 | 2.05 | 3.02 | 6.03 | 0.41 | 100 | 1.06E−03 | 2.70 | 6.5 |
| hsa-miR- | hsa-miR-200a-_st2 | 5.72 | 5.28 | 5.26 | 5.42 | 0.26 | 67 | 2.18 | 3.91 | 2.61 | 1.78 | 2.15 | 3.20 | 2.92 | 3.07 | 2.87 | 3.74 | 0.91 | 0 | 4.77E−05 | 2.68 | 6.4 |
| 200a* | | | | | | | | | | | | | | | | | | | | | | |
| hsa-asg-2399 | hsa-asg-2399_st2 | 5.28 | 4.58 | 5.66 | 5.17 | 0.55 | 33 | 2.86 | 3.01 | 2.19 | 2.53 | 1.08 | 2.27 | 2.54 | 3.07 | 3.42 | 4.74 | 0.50 | 0 | 1.33E−04 | 2.62 | 6.2 |
| hsa-asg-2484 | hsa-asg-2484_st2 | 5.57 | 4.87 | 5.23 | 5.22 | 0.35 | 67 | 1.39 | 4.00 | 2.19 | 2.35 | 3.40 | 2.78 | 2.54 | 2.43 | 2.36 | 4.10 | 0.28 | 0 | 1.81E−04 | 2.62 | 6.1 |
| hsa-asg- | hsa-asg-13908_st2 | 5.43 | 4.82 | 5.49 | 5.25 | 0.37 | 67 | 3.67 | 2.51 | 1.46 | 2.85 | 2.64 | 2.45 | 3.77 | 2.05 | 2.54 | 7.74 | 0.31 | 100 | 1.66E−04 | 2.59 | 6.0 |
| 13908 | | | | | | | | | | | | | | | | | | | | | | |
| hsa-asg-5021 | hsa-asg-5021_st1 | 7.12 | 7.24 | 7.36 | 7.24 | 0.12 | 100 | 6.99 | 6.06 | 5.91 | 3.54 | 4.59 | 3.07 | 2.10 | 5.18 | 4.43 | 2.75 | 0.63 | 0 | 2.00E−02 | 2.59 | 6.0 |
| hsa-miR-368 | hsa-miR-368_st2 | 8.88 | 8.72 | 8.95 | 8.85 | 0.12 | 100 | 7.70 | 8.08 | 7.70 | 5.24 | 5.64 | 3.99 | 5.09 | 6.49 | 6.52 | 7.73 | 0.74 | 100 | 1.12E−02 | 2.58 | 6.0 |
| hsa-asg- | hsa-asg-10881_st1 | 7.57 | 7.79 | 8.01 | 7.79 | 0.22 | 100 | 6.06 | 5.43 | 4.79 | 5.46 | 4.20 | 5.04 | 5.23 | 5.73 | 5.04 | 11.6 | 0.47 | 100 | 1.47E−05 | 2.57 | 5.9 |
| 10881 | | | | | | | | | | | | | | | | | | | | | | |
| hsa-miR-1 | hsa-miR-1_st1 | 12.5 | 12.6 | 12.4 | 12.5 | 0.06 | 100 | 8.18 | 11.7 | 10.7 | 10.0 | 10.1 | 7.66 | 9.47 | 11.0 | 10.8 | 3.70 | 0.32 | 0 | 9.87E−03 | 2.56 | 5.9 |
| hsa-miR-381 | hsa-miR-381_st2 | 5.67 | 5.34 | 5.98 | 5.66 | 0.32 | 100 | 4.21 | 3.40 | 4.21 | 2.99 | 3.50 | 1.29 | 3.25 | 2.78 | 2.36 | 8.62 | 0.59 | 100 | 9.53E−04 | 2.55 | 5.9 |
| hsa-miR-183 | hsa-miR-183_st1 | 9.29 | 9.51 | 9.82 | 9.54 | 0.27 | 100 | 6.71 | 7.93 | 7.56 | 5.83 | 7.52 | 6.32 | 6.65 | 7.66 | 6.76 | 6.16 | 0.72 | 89 | 1.41E−04 | 2.55 | 5.8 |
| hsa-asg- | hsa-asg-12139_st2 | 5.70 | 4.48 | 4.46 | 4.88 | 0.71 | 33 | 2.66 | 2.33 | 1.64 | 2.17 | 1.60 | 2.08 | 3.53 | 2.78 | 2.36 | 10.2 | 0.61 | 100 | 1.12E−04 | 2.53 | 5.8 |
| 12139 | | | | | | | | | | | | | | | | | | | | | | |
| hsa-miR-582 | hsa-miR-582_st1 | 6.99 | 6.61 | 7.51 | 7.04 | 0.45 | 100 | 4.54 | 5.96 | 4.89 | 4.10 | 4.07 | 4.35 | 4.67 | 5.85 | 2.16 | 6.38 | 0.40 | 78 | 3.97E−03 | 2.53 | 5.8 |
| hsa-miR-487b | hsa-miR-487b_st2 | 7.79 | 8.30 | 8.25 | 8.11 | 0.28 | 100 | 6.97 | 6.90 | 6.25 | 5.40 | 4.90 | 3.74 | 4.40 | 6.06 | 5.84 | 5.36 | 0.87 | 0 | 3.56E−03 | 2.51 | 5.7 |
| hsa-asg-3976 | hsa-asg-3976_st1 | 5.72 | 5.72 | 5.16 | 5.54 | 0.32 | 100 | 3.06 | 3.73 | 3.44 | 2.69 | 1.60 | 2.78 | 2.33 | 4.31 | 3.42 | 5.23 | 0.50 | 11 | 4.47E−04 | 2.50 | 5.6 |
| hsa-miR-96 | hsa-miR-96_st1 | 5.90 | 5.34 | 6.05 | 5.76 | 0.37 | 100 | 3.06 | 3.01 | 4.11 | 2.85 | 3.05 | 1.88 | 3.09 | 4.99 | 3.42 | 5.88 | 0.69 | 67 | 8.05E−04 | 2.49 | 5.6 |
| hsa-asg-378 | hsa-asg-378_st1 | 4.64 | 5.65 | 5.26 | 5.18 | 0.51 | 67 | 2.18 | 4.71 | 2.83 | 2.99 | 1.08 | 2.78 | 3.09 | 2.25 | 2.71 | 7.30 | 0.76 | 89 | 2.08E−03 | 2.45 | 5.4 |
| hsa-asg- | hsa-asg-10080_st1 | 5.32 | 4.78 | 4.23 | 4.78 | 0.55 | 0 | 2.43 | 1.82 | 2.37 | 2.44 | 2.48 | 2.27 | 3.39 | 2.05 | 1.75 | 5.29 | 0.88 | 11 | 2.33E−05 | 2.44 | 5.4 |
| 10080 | | | | | | | | | | | | | | | | | | | | | | |
| hsa-miR-9 | hsa-miR-9_st2 | 6.40 | 5.25 | 5.64 | 5.76 | 0.58 | 100 | 2.86 | 3.28 | 3.63 | 2.17 | 3.50 | 3.32 | 4.16 | 3.45 | 3.53 | 9.36 | 0.86 | 89 | 6.41E−05 | 2.44 | 5.4 |
| hsa-miR-9 | hsa-cand90_st2 | 6.20 | 3.49 | 4.35 | 4.68 | 1.39 | 33 | 2.66 | 3.01 | 2.83 | 2.17 | 2.64 | 1.68 | 3.65 | 3.56 | 3.16 | 7.10 | 0.76 | 89 | 7.52E−03 | 1.86 | 3.6 |
| hsa-asg- | hsa-asg-11088_st1 | 4.36 | 5.05 | 4.81 | 4.74 | 0.35 | 0 | 3.85 | 1.82 | 0.94 | 2.35 | 1.60 | 3.38 | 4.50 | 1.25 | 1.05 | 10.6 | 0.32 | 100 | 1.13E−02 | 2.44 | 5.4 |
| 11088 | | | | | | | | | | | | | | | | | | | | | | |
| hsa-asg-1296 | hsa-asg-1296_st1 | 5.76 | 5.37 | 5.88 | 5.67 | 0.26 | 67 | 4.81 | 2.42 | 2.53 | 2.77 | 3.17 | 3.91 | 4.16 | 3.07 | 2.54 | 3.99 | 0.66 | 11 | 8.01E−04 | 2.40 | 5.3 |
| hsa-asg- | hsa-asg-13070_st1 | 4.99 | 5.18 | 4.75 | 4.97 | 0.22 | 33 | 2.66 | 4.15 | 3.10 | 2.17 | 2.32 | 1.88 | 1.38 | 2.93 | 2.54 | 4.07 | 1.08 | 11 | 5.17E−04 | 2.40 | 5.3 |
| 13070 | | | | | | | | | | | | | | | | | | | | | | |
| Has-cand852 | hsa-cand852_st2 | 5.43 | 4.53 | 5.35 | 5.10 | 0.50 | 67 | 2.86 | 3.01 | 2.28 | 2.69 | 2.92 | 2.08 | 3.53 | 3.07 | 1.96 | 8.29 | 0.61 | 100 | 3.56E−05 | 2.39 | 5.2 |
| hsa-miR-376a | hsa-miR-376a_st2 | 6.93 | 6.57 | 6.78 | 6.76 | 0.18 | 100 | 5.49 | 5.67 | 4.85 | 4.03 | 2.48 | 3.83 | 3.77 | 5.14 | 4.08 | 8.41 | 1.11 | 100 | 2.75E−03 | 2.39 | 5.2 |
| hsa-miR-376a | hsa-asg-10049_st1 | 7.35 | 6.79 | 7.21 | 7.12 | 0.29 | 100 | 6.09 | 5.56 | 5.35 | 4.10 | 3.85 | 4.14 | 4.67 | 5.03 | 4.91 | 4.87 | 0.68 | 11 | 5.15E−04 | 2.26 | 4.8 |
| hsa-miR-376a | hsa-asg-14234_st1 | 6.30 | 5.28 | 5.69 | 5.76 | 0.52 | 100 | 3.39 | 4.00 | 4.85 | 3.69 | 2.92 | 4.07 | 1.86 | 3.33 | 4.30 | 6.17 | 0.44 | 67 | 2.59E−03 | 2.15 | 4.5 |
| hsa-miR-539 | hsa-miR-539_st1 | 4.36 | 5.21 | 5.23 | 4.93 | 0.49 | 67 | 2.66 | 3.40 | 2.69 | 2.99 | 1.97 | 2.62 | 1.38 | 2.05 | 3.16 | 5.41 | 0.58 | 22 | 1.67E−04 | 2.39 | 5.2 |
| hsa-miR-539 | hsa-miR177_st1 | 4.80 | 4.10 | 4.65 | 4.52 | 0.37 | 0 | 1.39 | 2.42 | 1.83 | 1.88 | 3.50 | 1.68 | 2.10 | 2.61 | 2.54 | 8.28 | 0.35 | 78 | 1.58E−04 | 2.30 | 4.9 |
| hsa-asg-6139 | hsa-asg-6139_st2 | 4.36 | 5.49 | 4.23 | 4.69 | 0.69 | 33 | 1.66 | 1.51 | 3.04 | 2.17 | 1.79 | 2.45 | 2.54 | 3.21 | 2.71 | 3.47 | 0.63 | 0 | 2.07E−04 | 2.35 | 5.1 |
| hsa-asg-4273 | hsa-asg-4273_st1 | 3.61 | 4.10 | 4.46 | 4.05 | 0.43 | 0 | 2.18 | 2.03 | 1.64 | 1.97 | 1.08 | 2.36 | 1.62 | 0.88 | 1.54 | 6.24 | 0.63 | 11 | 2.48E−05 | 2.35 | 5.1 |
| hsa-miR-218 | hsa-miR-218_st2 | 11.2 | 10.5 | 11.5 | 11.1 | 0.51 | 100 | 8.82 | 9.68 | 9.16 | 8.64 | 7.76 | 7.45 | 8.75 | 9.62 | 9.27 | 6.93 | 0.72 | 78 | 6.65E−04 | 2.34 | 5.1 |
| hsa-asg- | hsa-asg-10055_st1 | 3.95 | 4.42 | 4.51 | 4.29 | 0.30 | 0 | 2.18 | 1.11 | 2.01 | 2.69 | 1.42 | 2.27 | 2.92 | 2.05 | 0.95 | 8.14 | 0.57 | 100 | 2.08E−04 | 2.34 | 5.0 |
| 10055 | | | | | | | | | | | | | | | | | | | | | | |
| hsa-asg-9980 | hsa-asg-9980_st1 | 5.96 | 6.24 | 6.51 | 6.24 | 0.27 | 100 | 4.02 | 1.72 | 3.39 | 2.85 | 3.85 | 5.08 | 4.67 | 5.18 | 4.49 | 3.24 | 0.79 | 0 | 6.31E−03 | 2.32 | 5.0 |
| hsa-miR-299- | hsa-miR-299- | 7.18 | 6.96 | 7.12 | 7.08 | 0.11 | 100 | 5.80 | 6.38 | 5.99 | 2.99 | 5.05 | 2.45 | 3.97 | 5.73 | 4.49 | 4.59 | 0.40 | 0 | 1.86E−02 | 2.32 | 5.0 |
| 5p | 5p_st2 | | | | | | | | | | | | | | | | | | | | | |
| hsa-miR-154 | hsa-miR-154_st2 | 5.98 | 5.28 | 6.19 | 5.82 | 0.48 | 100 | 4.30 | 4.36 | 4.91 | 3.13 | 3.17 | 1.29 | 3.97 | 3.76 | 2.54 | 2.49 | 0.84 | 0 | 6.19E−03 | 2.32 | 5.0 |
| hsa-asg-8174 | hsa-asg-8174_st1 | 5.03 | 5.79 | 5.84 | 5.55 | 0.45 | 67 | 2.86 | 3.01 | 2.90 | 3.26 | 2.78 | 2.78 | 4.16 | 3.33 | 4.08 | 5.71 | 0.75 | 33 | 5.51E−05 | 2.31 | 5.0 |
| hsa-asg- | hsa-asg-13254_st1 | 6.96 | 7.45 | 7.20 | 7.20 | 0.24 | 100 | 6.65 | 5.89 | 5.90 | 4.03 | 4.73 | 2.45 | 3.39 | 5.60 | 5.37 | 10.8 | 0.64 | 100 | 1.77E−02 | 2.31 | 5.0 |
| 13254 | | | | | | | | | | | | | | | | | | | | | | |
| hsa-asg-7471 | hsa-asg-7471_st1 | 8.21 | 7.71 | 7.96 | 7.96 | 0.25 | 100 | 5.67 | 6.74 | 5.70 | 5.30 | 5.25 | 5.00 | 6.09 | 5.60 | 5.72 | 4.80 | 0.42 | 11 | 2.68E−05 | 2.29 | 4.9 |
| hsa-asg-5119 | hsa-asg-5119_st1 | 5.10 | 4.64 | 4.65 | 4.80 | 0.27 | 0 | 1.92 | 1.93 | 2.01 | 2.53 | 2.92 | 2.62 | 3.65 | 2.43 | 2.71 | 5.08 | 0.45 | 33 | 5.44E−05 | 2.27 | 4.8 |
| hsa-asg- | hsa-asg-13205_st1 | 8.83 | 8.10 | 9.05 | 8.66 | 0.50 | 100 | 7.09 | 7.51 | 6.90 | 6.04 | 6.76 | 5.59 | 4.40 | 7.02 | 6.39 | 7.29 | 0.47 | 100 | 3.29E−03 | 2.25 | 4.8 |
| 13205 | | | | | | | | | | | | | | | | | | | | | | |
| hsa-asg- | hsa-asg-10391_st2 | 6.69 | 6.36 | 7.13 | 6.73 | 0.39 | 100 | 2.96 | 5.39 | 5.57 | 4.03 | 3.59 | 2.70 | 4.81 | 5.62 | 5.68 | 6.90 | 1.04 | 89 | 1.08E−02 | 2.25 | 4.7 |
| 10391 | | | | | | | | | | | | | | | | | | | | | | |
| hsa-asg-8987 | hsa-asg-8987_st1 | 6.34 | 5.42 | 5.81 | 5.85 | 0.46 | 67 | 2.76 | 3.46 | 3.54 | 5.01 | 1.97 | 3.87 | 4.81 | 2.25 | 4.84 | 2.73 | 0.48 | 0 | 8.74E−03 | 2.24 | 4.7 |
| hsa-miR-9* | hsa-miR-9-_st2 | 8.17 | 7.33 | 7.86 | 7.79 | 0.42 | 100 | 5.57 | 6.11 | 5.41 | 5.87 | 4.94 | 4.73 | 5.23 | 6.20 | 6.10 | 6.03 | 0.57 | 44 | 7.36E−05 | 2.22 | 4.6 |
| hsa-asg- | hsa-asg-11361_st2 | 5.07 | 5.55 | 6.05 | 5.56 | 0.49 | 67 | 3.39 | 3.28 | 3.63 | 3.37 | 3.85 | 2.62 | 4.32 | 2.78 | 3.53 | 5.10 | 0.64 | 22 | 9.36E−05 | 2.14 | 4.4 |
| 11361_st2 | | | | | | | | | | | | | | | | | | | | | | |
| hsa-asg- | hsa-asg-14150_st1 | 8.77 | 8.01 | 8.92 | 8.57 | 0.49 | 100 | 7.01 | 7.73 | 6.67 | 5.80 | 5.79 | 5.15 | 6.39 | 7.05 | 6.35 | 2.22 | 0.61 | 0 | 1.44E−03 | 2.13 | 4.4 |
| 14150 | | | | | | | | | | | | | | | | | | | | | | |
| hsa-miR-199b | hsa-miR-199b_st2 | 11.2 | 10.9 | 11.2 | 11.1 | 0.19 | 100 | 9.04 | 10.6 | 10.3 | 8.25 | 9.05 | 6.55 | 8.85 | 9.40 | 9.08 | 7.39 | 0.53 | 100 | 1.38E−02 | 2.12 | 4.4 |
| hsa-asg- | hsa-asg-12690_st1 | 5.14 | 4.82 | 5.35 | 5.10 | 0.26 | 33 | 2.66 | 3.40 | 3.49 | 2.85 | 2.92 | 2.93 | 2.10 | 3.76 | 2.87 | 2.31 | 0.94 | 0 | 4.19E−05 | 2.11 | 4.3 |
| 12690 | | | | | | | | | | | | | | | | | | | | | | |
| hsa-asg-6845 | hsa-asg-6845_st2 | 5.23 | 4.39 | 4.87 | 4.83 | 0.42 | 0 | 2.43 | 3.15 | 2.69 | 2.85 | 2.23 | 2.45 | 3.09 | 2.61 | 3.10 | 5.62 | 0.65 | 22 | 4.48E−06 | 2.10 | 4.3 |
| hsa-asg- | hsa-asg-12227_st1 | 4.21 | 4.13 | 3.80 | 4.05 | 0.21 | 0 | 2.18 | 1.21 | 1.92 | 1.97 | 2.78 | 2.62 | 2.74 | 1.65 | 0.78 | 7.97 | 0.45 | 100 | 5.87E−04 | 2.06 | 4.2 |
| 12227 | | | | | | | | | | | | | | | | | | | | | | |
| hsa-miR-329 | hsa-asg-13589_st2 | 4.91 | 5.49 | 5.32 | 5.24 | 0.30 | 67 | 3.79 | 3.73 | 4.42 | 2.35 | 3.68 | 2.78 | 3.09 | 1.65 | 3.16 | 4.83 | 0.83 | 33 | 2.38E−03 | 2.06 | 4.2 |
| hsa-miR-329 | hsa-miR-329_st1 | 5.31 | 5.14 | 5.35 | 5.27 | 0.11 | 67 | 4.61 | 3.28 | 4.58 | 2.85 | 2.78 | 3.32 | 2.74 | 3.76 | 3.02 | 4.63 | 1.28 | 44 | 1.85E−03 | 1.83 | 3.6 |
| hsa-miR-329 | hsa-asg-13204_st2 | 4.87 | 4.99 | 5.16 | 5.01 | 0.15 | 33 | 4.21 | 3.40 | 4.24 | 3.48 | 4.00 | 2.62 | 3.53 | 4.09 | 2.87 | 4.56 | 0.58 | 33 | 2.59E−03 | 1.40 | 2.6 |
| hsa-asg- | hsa-asg-13308_st2 | 11.4 | 11.2 | 11.7 | 11.4 | 0.21 | 100 | 9.58 | 9.81 | 9.17 | 8.63 | 9.51 | 8.96 | 9.11 | 10.5 | 9.46 | 4.17 | 0.53 | 0 | 1.29E−04 | 2.05 | 4.1 |
| 13308 | | | | | | | | | | | | | | | | | | | | | | |
| hsa-asg-4219 | hsa-asg-4219_st1 | 4.64 | 4.42 | 4.46 | 4.50 | 0.12 | 0 | 1.66 | 1.51 | 2.28 | 1.78 | 2.92 | 2.78 | 3.97 | 3.45 | 1.75 | 5.83 | 0.53 | 33 | 2.88E−03 | 2.05 | 4.1 |
| hsa-miR-331 | hsa-asg-14205_st1 | 8.71 | 8.30 | 8.50 | 8.51 | 0.21 | 100 | 7.37 | 7.77 | 6.85 | 4.77 | 6.64 | 5.46 | 5.93 | 7.53 | 5.85 | 6.53 | 0.37 | 100 | 7.65E−03 | 2.04 | 4.1 |
| hsa-miR-331 | hsa-miR-331_st2 | 9.78 | 9.64 | 9.85 | 9.76 | 0.10 | 100 | 8.35 | 8.79 | 7.69 | 7.09 | 7.70 | 7.28 | 7.20 | 9.04 | 7.57 | 5.19 | 0.93 | 11 | 1.16E−03 | 1.90 | 3.7 |
| hsa-asg-4140 | hsa-asg-4140_st2 | 5.52 | 5.95 | 5.46 | 5.64 | 0.27 | 100 | 3.23 | 4.36 | 3.81 | 3.48 | 4.14 | 3.74 | 2.74 | 3.45 | 3.53 | 3.90 | 0.75 | 11 | 4.60E−05 | 2.03 | 4.1 |
| hsa-asg-7469 | hsa-asg-7469_st1 | 5.21 | 4.68 | 5.13 | 5.01 | 0.28 | 0 | 3.14 | 4.86 | 4.45 | 1.29 | 2.48 | 2.17 | 3.59 | 2.61 | 2.45 | 5.21 | 0.70 | 56 | 1.47E−02 | 2.00 | 4.0 |
| hsa-asg-3998 | hsa-asg-3998_st1 | 10.7 | 10.5 | 10.9 | 10.7 | 0.20 | 100 | 8.70 | 9.41 | 8.77 | 8.37 | 9.21 | 8.76 | 8.49 | 8.63 | 8.58 | 4.24 | 0.69 | 0 | 2.63E−06 | 1.99 | 4.0 |
| hsa-asg-5304 | hsa-asg-5304_st1 | 11.4 | 11.3 | 11.6 | 11.5 | 0.15 | 100 | 9.75 | 10.1 | 9.40 | 8.81 | 9.58 | 9.07 | 9.15 | 10.6 | 9.48 | 4.05 | 1.09 | 0 | 1.65E−04 | 1.96 | 3.9 |
| hsa-asg- | hsa-asg-13166_st2 | 6.00 | 5.82 | 5.96 | 5.93 | 0.10 | 100 | 4.87 | 4.95 | 4.11 | 4.18 | 3.59 | 2.08 | 4.07 | 4.49 | 3.42 | 4.69 | 0.50 | 22 | 3.91E−03 | 1.95 | 3.9 |
| 13166 | | | | | | | | | | | | | | | | | | | | | | |
| hsa-miR-422a | hsa-miR-422a_st1 | 11.1 | 10.8 | 11.3 | 11.1 | 0.24 | 100 | 9.17 | 9.80 | 8.98 | 8.85 | 9.69 | 9.24 | 9.14 | 9.10 | 9.02 | 6.65 | 0.50 | 11 | 2.65E−06 | 1.92 | 3.8 |
| hsa-asg-1596 | hsa-asg-1596_st2 | 5.78 | 6.48 | 6.19 | 6.15 | 0.35 | 100 | 4.02 | 3.21 | 4.39 | 4.18 | 4.14 | 4.21 | 4.40 | 4.43 | 5.12 | 7.44 | 0.69 | 89 | 1.15E−04 | 1.92 | 3.8 |
| hsa-miR-369- | hsa-miR-369- | 5.74 | 5.14 | 5.20 | 5.36 | 0.33 | 100 | 4.47 | 4.36 | 4.36 | 2.53 | 2.92 | 2.62 | 3.53 | 3.56 | 2.71 | 9.29 | 0.78 | 89 | 2.80E−03 | 1.91 | 3.8 |
| 5p | 5p_st2 | | | | | | | | | | | | | | | | | | | | | |
| hsa-miR-369- | hsa-asg-1521_st1 | 4.56 | 4.64 | 4.75 | 4.65 | 0.09 | 0 | 4.02 | 2.23 | 3.72 | 3.73 | 3.40 | 2.78 | 3.53 | 3.76 | 3.42 | 4.97 | 0.26 | 11 | 3.86E−03 | 1.25 | 2.4 |
| 5p | | | | | | | | | | | | | | | | | | | | | | |
| hsa-asg-128 | hsa-asg-128_st2 | 6.69 | 6.43 | 6.40 | 6.51 | 0.16 | 100 | 4.54 | 5.12 | 4.55 | 4.18 | 4.98 | 4.35 | 4.16 | 4.85 | 4.76 | 2.95 | 0.83 | 0 | 4.12E−06 | 1.90 | 3.7 |
| hsa-miR-210 | hsa-miR-210_st1 | 9.21 | 7.99 | 8.33 | 8.51 | 0.63 | 100 | 6.84 | 7.08 | 7.11 | 6.71 | 6.11 | 6.48 | 7.02 | 6.51 | 5.65 | 4.14 | 2.01 | 22 | 2.67E−04 | 1.90 | 3.7 |
| hsa-asg-9280 | hsa-asg-9280_st1 | 4.14 | 4.80 | 4.61 | 4.52 | 0.34 | 0 | 3.23 | 3.21 | 3.04 | 2.85 | 3.05 | 2.08 | 1.86 | 3.45 | 0.95 | 6.51 | 0.64 | 89 | 3.88E−03 | 1.88 | 3.7 |
| hsa-miR-101 | hsa-miR-101_st1 | 7.78 | 6.74 | 7.57 | 7.36 | 0.55 | 100 | 4.21 | 5.98 | 6.52 | 4.70 | 4.86 | 4.35 | 5.09 | 7.18 | 6.53 | 2.77 | 1.03 | 0 | 1.85E−02 | 1.87 | 3.7 |
| hsa-miR-409- | hsa-miR-409- | 6.07 | 5.78 | 5.06 | 5.64 | 0.52 | 0 | 5.14 | 4.99 | 4.77 | 2.99 | 3.96 | 2.62 | 3.77 | 2.25 | 3.47 | 5.46 | 0.87 | 22 | 1.58E−02 | 1.86 | 3.6 |
| 3p | 3p_st1 | | | | | | | | | | | | | | | | | | | | | |
| hsa-miR-18a | hsa-miR-18a_st1 | 7.51 | 6.88 | 7.78 | 7.39 | 0.46 | 100 | 7.10 | 5.97 | 4.53 | 4.14 | 5.69 | 5.67 | 4.89 | 5.78 | 6.02 | 2.40 | 0.47 | 0 | 6.91E−03 | 1.86 | 3.6 |
| hsa-asg-9830 | hsa-asg-9830_st2 | 4.45 | 5.57 | 3.54 | 4.52 | 1.02 | 33 | 1.92 | 2.23 | 2.19 | 2.26 | 3.50 | 2.27 | 4.24 | 3.07 | 2.54 | 7.50 | 0.72 | 56 | 7.37E−03 | 1.83 | 3.6 |
| hsa-asg- | hsa-asg-10360_st1 | 4.91 | 5.28 | 5.16 | 5.12 | 0.19 | 67 | 3.06 | 4.66 | 3.72 | 3.26 | 3.17 | 2.45 | 2.74 | 3.45 | 3.42 | 3.01 | 1.05 | 0 | 8.17E−04 | 1.79 | 3.5 |
| 10360 | | | | | | | | | | | | | | | | | | | | | | |
| hsa-miR-365 | hsa-cand708_st1 | 6.43 | 6.60 | 6.85 | 6.62 | 0.21 | 100 | 4.02 | 6.58 | 5.46 | 4.24 | 5.64 | 3.07 | 3.53 | 5.94 | 5.23 | 5.41 | 0.36 | 33 | 3.23E−02 | 1.77 | 3.4 |
| hsa-miR-365 | hsa-miR-365_st1 | 7.64 | 7.46 | 7.72 | 7.61 | 0.14 | 100 | 5.53 | 7.63 | 6.38 | 5.40 | 6.66 | 4.78 | 4.78 | 7.27 | 5.64 | 4.90 | 0.78 | 22 | 2.71E−02 | 1.60 | 3.0 |
| hsa-miR-365 | hsa-asg-13156_st1 | 7.57 | 7.47 | 7.55 | 7.53 | 0.05 | 100 | 6.09 | 7.37 | 6.38 | 5.46 | 6.63 | 4.78 | 4.67 | 7.33 | 5.87 | 3.35 | 0.83 | 0 | 3.13E−02 | 1.47 | 2.8 |
| hsa-asg-548 | hsa-asg-548_st1 | 4.48 | 5.14 | 4.87 | 4.83 | 0.33 | 33 | 3.54 | 3.52 | 2.83 | 1.97 | 3.40 | 2.78 | 4.60 | 3.07 | 1.96 | 8.72 | 0.60 | 100 | 5.74E−03 | 1.76 | 3.4 |
| hsa-miR-432 | hsa-miR-432_st2 | 6.00 | 7.04 | 6.67 | 6.57 | 0.52 | 100 | 5.92 | 5.53 | 5.77 | 5.68 | 3.50 | 4.28 | 2.74 | 4.55 | 5.43 | 3.90 | 0.72 | 11 | 2.98E−02 | 1.75 | 3.4 |
| Has-miR202 | hsa-miR202_st2 | 4.85 | 5.60 | 5.20 | 5.21 | 0.38 | 33 | 4.93 | 3.95 | 3.63 | 2.44 | 4.27 | 2.45 | 3.09 | 3.85 | 2.71 | 6.76 | 0.45 | 100 | 8.25E−03 | 1.73 | 3.3 |
| hsa-asg-8616 | hsa-asg-8616_st2 | 4.64 | 5.37 | 5.51 | 5.17 | 0.47 | 67 | 1.66 | 4.55 | 3.59 | 4.24 | 3.85 | 2.08 | 3.09 | 3.45 | 4.49 | 5.69 | 0.55 | 22 | 1.97E−02 | 1.73 | 3.3 |
| hsa-asg- | hsa-asg-14146_st1 | 7.77 | 7.19 | 7.70 | 7.55 | 0.31 | 100 | 6.23 | 6.49 | 5.95 | 4.84 | 5.80 | 4.68 | 6.48 | 6.30 | 5.77 | 4.74 | 0.70 | 11 | 1.82E−03 | 1.72 | 3.3 |
| 14146 | | | | | | | | | | | | | | | | | | | | | | |
| hsa-miR-30e- | hsa-miR-30e- | 11.5 | 10.9 | 11.4 | 11.2 | 0.32 | 100 | 9.71 | 10.5 | 9.81 | 9.23 | 9.23 | 8.15 | 9.50 | 10.4 | 9.64 | 4.27 | 0.87 | 11 | 2.58E−03 | 1.71 | 3.3 |
| 5p | 5p_st2 | | | | | | | | | | | | | | | | | | | | | |
| hsa-miR-422b | hsa-miR-422b_st2 | 12.4 | 12.1 | 12.6 | 12.4 | 0.22 | 100 | 10.7 | 11.3 | 10.7 | 10.3 | 10.9 | 10.7 | 10.5 | 10.6 | 10.5 | 4.45 | 0.71 | 0 | 2.00E−06 | 1.70 | 3.3 |
| hsa-asg-2419 | hsa-asg-2419_st2 | 4.03 | 4.17 | 4.46 | 4.22 | 0.22 | 67 | 3.39 | 2.85 | 2.01 | 1.78 | 1.60 | 2.45 | 3.25 | 2.61 | 2.71 | 3.97 | 0.61 | 78 | 1.12E−03 | 1.70 | 3.2 |
| hsa-miR-296 | hsa-miR-296_st1 | 6.20 | 6.36 | 6.37 | 6.31 | 0.09 | 100 | 5.55 | 5.86 | 5.01 | 3.78 | 4.27 | 4.03 | 3.32 | 5.29 | 4.40 | 5.38 | 0.62 | 44 | 7.81E−03 | 1.70 | 3.2 |
| hsa-miR-135b | hsa-miR-135b_st2 | 4.91 | 3.49 | 4.46 | 4.29 | 0.72 | 0 | 2.43 | 2.85 | 2.37 | 3.13 | 3.29 | 2.27 | 2.92 | 1.45 | 2.71 | 4.80 | 1.13 | 22 | 1.66E−03 | 1.68 | 3.2 |
| hsa-miR-135b | hsa-cand78_st1 | 5.10 | 4.10 | 5.41 | 4.87 | 0.69 | 0 | 3.67 | 4.15 | 3.72 | 2.85 | 3.59 | 1.68 | 3.25 | 3.45 | 2.54 | 9.60 | 1.17 | 100 | 7.07E−03 | 1.66 | 3.2 |
| hsa-miR-493- | hsa-miR-493- | 4.91 | 5.03 | 5.38 | 5.11 | 0.24 | 0 | 4.07 | 3.01 | 2.28 | 1.88 | 4.33 | 3.49 | 4.11 | 4.66 | 3.10 | 5.28 | 0.49 | 44 | 1.51E−02 | 1.67 | 3.2 |
| 3p | 3p_st1 | | | | | | | | | | | | | | | | | | | | | |
| hsa-miR-598 | hsa-miR-598_st2 | 7.16 | 7.06 | 7.69 | 7.30 | 0.34 | 100 | 5.89 | 6.87 | 5.97 | 5.59 | 5.59 | 3.07 | 5.05 | 6.71 | 5.98 | 5.23 | 0.30 | 0 | 3.26E−02 | 1.67 | 3.2 |
| hsa-miR-95 | hsa-miR-95_st1 | 10.8 | 10.3 | 10.8 | 10.6 | 0.26 | 100 | 9.82 | 10.1 | 9.57 | 8.44 | 9.10 | 7.82 | 8.21 | 9.39 | 8.65 | 5.89 | 0.29 | 78 | 5.86E−03 | 1.66 | 3.2 |
| hsa-asg- | hsa-asg-13279_st1 | 8.84 | 8.56 | 9.26 | 8.88 | 0.35 | 100 | 7.55 | 8.17 | 7.24 | 6.59 | 6.87 | 7.00 | 6.68 | 7.58 | 7.47 | 7.36 | 0.43 | 56 | 4.40E−04 | 1.64 | 3.1 |
| 13279 | | | | | | | | | | | | | | | | | | | | | | |
| hsa-asg- | hsa-asg-14233_st1 | 11.0 | 10.6 | 10.9 | 10.8 | 0.20 | 100 | 9.23 | 10.1 | 9.44 | 8.89 | 9.05 | 8.87 | 8.89 | 9.45 | 9.26 | 5.63 | 0.32 | 56 | 6.70E−05 | 1.63 | 3.1 |
| 14233 | | | | | | | | | | | | | | | | | | | | | | |
| hsa-miR-323 | hsa-miR-323_st1 | 5.56 | 5.74 | 5.38 | 5.56 | 0.18 | 0 | 4.02 | 5.77 | 5.12 | 2.99 | 3.64 | 2.93 | 3.25 | 4.17 | 3.47 | 5.97 | 0.49 | 89 | 1.86E−02 | 1.63 | 3.1 |
| hsa-cand206 | hsa-cand206_st1 | 4.10 | 4.58 | 4.23 | 4.30 | 0.25 | 0 | 3.79 | 3.63 | 2.69 | 2.17 | 3.59 | 1.29 | 2.74 | 2.25 | 1.96 | 6.29 | 0.54 | 67 | 1.03E−02 | 1.63 | 3.1 |
| hsa-asg-4283 | hsa-asg-4283_st2 | 4.64 | 4.99 | 4.91 | 4.85 | 0.19 | 0 | 2.66 | 3.82 | 3.93 | 2.85 | 3.50 | 2.27 | 2.54 | 3.93 | 3.53 | 4.88 | 0.45 | 22 | 1.99E−03 | 1.62 | 3.1 |
| hsa-miR-410 | hsa-miR-410_st1 | 4.73 | 4.17 | 3.54 | 4.15 | 0.60 | 0 | 1.39 | 3.73 | 2.53 | 2.85 | 3.17 | 1.88 | 2.54 | 2.43 | 2.36 | 8.08 | 0.42 | 100 | 4.69E−03 | 1.60 | 3.0 |
| hsa-asg-3912 | hsa-asg-3912_st1 | 3.51 | 4.02 | 4.16 | 3.90 | 0.35 | 0 | 2.86 | 1.61 | 2.19 | 1.19 | 2.92 | 2.17 | 3.53 | 1.65 | 2.54 | 4.69 | 0.76 | 22 | 5.57E−03 | 1.60 | 3.0 |
| hsa-miR-182 | hsa-miR-182_st1 | 10.5 | 10.7 | 11.3 | 10.8 | 0.42 | 100 | 8.85 | 9.82 | 9.37 | 9.55 | 8.99 | 8.57 | 8.13 | 10.2 | 10.0 | 2.47 | 0.48 | 0 | 4.47E−03 | 1.59 | 3.0 |
| hsa-asg- | hsa-asg-11160_st2 | 5.05 | 4.39 | 5.06 | 4.83 | 0.38 | 0 | 3.39 | 3.08 | 2.90 | 2.69 | 2.48 | 3.54 | 5.14 | 2.78 | 3.16 | 10.42 | 0.83 | 100 | 8.04E−03 | 1.59 | 3.0 |
| 11160 | | | | | | | | | | | | | | | | | | | | | | |
| hsa-asg- | hsa-asg-14172_st1 | 6.31 | 4.82 | 6.22 | 5.79 | 0.83 | 67 | 4.47 | 5.45 | 4.81 | 2.77 | 3.59 | 3.74 | 5.18 | 5.07 | 2.71 | 7.55 | 0.55 | 56 | 3.82E−02 | 1.59 | 3.0 |
| 14172 | | | | | | | | | | | | | | | | | | | | | | |
| hsa-miR-128a | hsa-miR-128a_st2 | 10.8 | 11.0 | 10.9 | 10.9 | 0.11 | 100 | 9.71 | 9.95 | 8.86 | 8.99 | 9.01 | 8.77 | 8.68 | 10.7 | 9.36 | 4.57 | 0.82 | 22 | 3.24E−03 | 1.59 | 3.0 |
| hsa-cand631 | hsa-cand631_st1 | 5.46 | 4.91 | 5.26 | 5.21 | 0.28 | 33 | 4.12 | 4.71 | 3.85 | 2.17 | 3.93 | 2.93 | 3.25 | 4.09 | 3.64 | 5.30 | 0.99 | 22 | 6.16E−03 | 1.58 | 3.0 |
| hsa-miR-127 | hsa-miR-127_st1 | 8.38 | 8.47 | 7.48 | 8.11 | 0.55 | 100 | 7.95 | 7.53 | 7.69 | 5.72 | 6.59 | 5.49 | 5.44 | 6.81 | 5.57 | 3.58 | 0.55 | 0 | 3.13E−02 | 1.58 | 3.0 |
| hsa-cand330 | hsa-cand330_st2 | 5.74 | 5.82 | 5.82 | 5.79 | 0.04 | 100 | 3.54 | 4.71 | 5.15 | 4.18 | 2.64 | 3.99 | 3.97 | 4.76 | 5.04 | 3.54 | 0.98 | 0 | 8.22E−03 | 1.57 | 3.0 |
| hsa-miR-379 | hsa-miR-379_st1 | 8.16 | 8.19 | 8.15 | 8.16 | 0.02 | 100 | 7.11 | 6.97 | 7.04 | 6.59 | 6.35 | 6.14 | 6.23 | 6.52 | 6.42 | 4.61 | 0.20 | 0 | 2.66E−05 | 1.57 | 3.0 |
| hsa-asg- | hsa-asg-8411_st2 | 6.50 | 6.01 | 6.39 | 6.30 | 0.26 | 100 | 5.04 | 6.08 | 5.09 | 4.87 | 4.14 | 2.93 | 4.07 | 5.92 | 4.49 | 5.29 | 0.28 | 67 | 2.32E−02 | 1.57 | 3.0 |
| 8411_st2 | | | | | | | | | | | | | | | | | | | | | | |
| hsa-asg- | hsa-asg-7472_st2 | 3.23 | 4.20 | 3.23 | 3.55 | 0.56 | 0 | 1.92 | 2.03 | 2.90 | 1.78 | 3.59 | 0.93 | 0.93 | 1.65 | 2.16 | 5.22 | 0.54 | 22 | 1.55E−02 | 1.56 | 3.0 |
| 7472_st2 | | | | | | | | | | | | | | | | | | | | | | |
| hsa-asg-1619 | hsa-asg-1619_st2 | 4.64 | 4.91 | 5.13 | 4.89 | 0.25 | 0 | 2.86 | 4.81 | 3.16 | 2.85 | 2.32 | 3.07 | 3.25 | 4.37 | 3.29 | 7.41 | 0.81 | 100 | 7.78E−03 | 1.56 | 2.9 |
| hsa-asg-1270 | hsa-asg-1270_st2 | 4.87 | 5.03 | 5.71 | 5.20 | 0.45 | 33 | 1.92 | 4.08 | 4.58 | 4.89 | 3.05 | 3.32 | 3.25 | 4.24 | 3.64 | 7.45 | 1.54 | 67 | 1.96E−02 | 1.54 | 2.9 |
| hsa-asg- | hsa-asg-13888_st2 | 3.17 | 4.36 | 3.88 | 3.80 | 0.60 | 0 | 1.66 | 3.15 | 1.83 | 2.17 | 2.64 | 1.88 | 2.74 | 1.45 | 2.87 | 6.12 | 0.45 | 89 | 3.31E−03 | 1.54 | 2.9 |
| 13888 | | | | | | | | | | | | | | | | | | | | | | |
| hsa-asg- | hsa-asg-14163_st2 | 7.53 | 6.56 | 8.43 | 7.51 | 0.93 | 100 | 6.60 | 7.29 | 5.69 | 5.73 | 6.30 | 4.91 | 4.40 | 6.59 | 6.24 | 4.98 | 0.47 | 11 | 2.93E−02 | 1.53 | 2.9 |
| 14163 | | | | | | | | | | | | | | | | | | | | | | |
| hsa-miR-18b | hsa-miR-18b_st1 | 7.22 | 6.66 | 7.48 | 7.12 | 0.42 | 100 | 6.71 | 6.01 | 5.09 | 4.68 | 5.71 | 4.87 | 5.60 | 6.18 | 5.61 | 5.97 | 0.28 | 56 | 3.96E−03 | 1.52 | 2.9 |
| hsa-miR-128b | hsa-miR-128b_st1 | 11.1 | 11.3 | 11.3 | 11.2 | 0.12 | 100 | 10.0 | 10.3 | 9.19 | 9.33 | 9.54 | 9.19 | 9.25 | 11.2 | 9.83 | 4.88 | 0.58 | 22 | 4.74E−03 | 1.49 | 2.8 |
| hsa-asg- | hsa-asg-12841_st1 | 4.66 | 4.93 | 4.83 | 4.81 | 0.14 | 0 | 2.18 | 4.15 | 4.04 | 4.10 | 2.71 | 3.20 | 1.62 | 4.09 | 3.87 | 7.34 | 1.39 | 100 | 2.72E−02 | 1.48 | 2.8 |
| 12841 | | | | | | | | | | | | | | | | | | | | | | |
| hsa-asg-2967 | hsa-asg-2967_st2 | 6.40 | 5.99 | 6.16 | 6.18 | 0.21 | 100 | 4.54 | 4.81 | 5.95 | 4.43 | 3.93 | 4.35 | 4.32 | 5.18 | 4.86 | 3.84 | 0.86 | 11 | 2.10E−03 | 1.47 | 2.8 |
| hsa-miR-106b | hsa-miR-106b_st2 | 11.1 | 10.3 | 11.3 | 10.9 | 0.51 | 100 | 10.0 | 10.0 | 9.43 | 8.17 | 9.21 | 9.10 | 9.76 | 9.91 | 9.64 | 7.77 | 0.80 | 0 | 3.49E−03 | 1.47 | 2.8 |
| hsa-miR-497 | hsa-miR-497_st1 | 8.70 | 8.10 | 8.65 | 8.48 | 0.33 | 100 | 6.23 | 8.75 | 7.86 | 6.49 | 6.51 | 5.62 | 6.69 | 7.43 | 7.60 | 2.14 | 0.48 | 0 | 3.13E−02 | 1.46 | 2.8 |
| hsa-miR-497 | hsa-miR43_st1 | 9.41 | 8.93 | 9.47 | 9.27 | 0.29 | 100 | 7.51 | 9.37 | 8.88 | 7.78 | 7.45 | 7.13 | 7.83 | 8.20 | 8.56 | 7.80 | 1.03 | 89 | 2.40E−02 | 1.19 | 2.3 |
| hsa-asg-6883 | hsa-asg-6883_st1 | 6.10 | 5.6 | 5.51 | 5.76 | 0.30 | 66.6 | 5.09 | 4.47 | 3.63 | 4.40 | 4.20 | 3.54 | 4.60 | 4.61 | 4.23 | 3.55 | 0.44 | 0 | 0.000709 | 1.45 | 2.74 |
| hsa-asg- | hsa-asg-14176_st1 | 6.98 | 7.23 | 6.61 | 6.94 | 0.31 | 100 | 5.28 | 6.77 | 6.26 | 5.43 | 5.46 | 4.21 | 4.16 | 6.06 | 5.72 | 4.66 | 0.23 | 11 | 2.03E−02 | 1.46 | 2.7 |
| 14176 | | | | | | | | | | | | | | | | | | | | | | |
| hsa-asg-3807 | hsa-asg-3807_st1 | 4.39 | 4.17 | 5.46 | 4.67 | 0.69 | 0 | 3.06 | 3.95 | 3.89 | 1.68 | 3.40 | 2.93 | 3.65 | 3.07 | 3.42 | 5.31 | 0.55 | 67 | 1.01E−02 | 1.45 | 2.7 |
| hsa-miR-140 | hsa-miR-140_st2 | 7.86 | 7.08 | 7.54 | 7.49 | 0.40 | 100 | 6.37 | 7.22 | 6.63 | 5.50 | 4.78 | 4.78 | 5.27 | 7.73 | 6.16 | 8.00 | 0.79 | 100 | 4.62E−02 | 1.45 | 2.7 |
| hsa-asg-8380 | hsa-asg-8380_st2 | 5.03 | 5.79 | 5.51 | 5.45 | 0.39 | 67 | 3.91 | 5.56 | 4.58 | 4.18 | 2.78 | 2.93 | 4.54 | 4.17 | 3.42 | 6.03 | 0.55 | 78 | 2.21E−02 | 1.44 | 2.7 |
| hsa-asg-9009 | hsa-asg-9009_st1 | 6.44 | 5.68 | 6.07 | 6.06 | 0.38 | 33 | 4.17 | 4.49 | 4.45 | 5.25 | 4.94 | 3.69 | 4.02 | 5.03 | 5.57 | 5.60 | 0.45 | 11 | 3.86E−03 | 1.44 | 2.7 |
| hsa-asg-259 | hsa-asg-259_st2 | 5.88 | 5.25 | 6.07 | 5.73 | 0.43 | 100 | 4.54 | 5.04 | 4.42 | 4.18 | 3.29 | 3.91 | 3.25 | 5.29 | 4.76 | 5.11 | 0.26 | 0 | 9.20E−03 | 1.43 | 2.7 |
| hsa-asg-8079 | hsa-asg-8079_st1 | 5.81 | 6.39 | 6.29 | 6.17 | 0.31 | 100 | 3.73 | 4.19 | 5.54 | 5.17 | 3.68 | 3.78 | 5.33 | 5.07 | 6.19 | 5.88 | 0.34 | 56 | 2.80E−02 | 1.42 | 2.7 |
| hsa-asg- | hsa-asg-12825_st1 | 4.24 | 4.36 | 6.34 | 4.98 | 1.18 | 33 | 2.43 | 4.49 | 3.77 | 4.55 | 3.77 | 3.74 | 3.09 | 3.07 | 3.16 | 2.63 | 0.75 | 0 | 2.61E−02 | 1.42 | 2.7 |
| 12825 | | | | | | | | | | | | | | | | | | | | | | |
| hsa-asg- | hsa-asg-12666_st2 | 6.80 | 6.57 | 5.35 | 6.24 | 0.78 | 100 | 4.87 | 4.91 | 4.65 | 4.60 | 4.82 | 3.99 | 4.84 | 6.08 | 4.66 | 11.6 | 0.41 | 100 | 5.42E−03 | 1.42 | 2.7 |
| 12666 | | | | | | | | | | | | | | | | | | | | | | |
| hsa-miR-299- | hsa-miR-299- | 4.66 | 4.68 | 3.72 | 4.35 | 0.55 | 0 | 3.39 | 2.93 | 3.44 | 2.77 | 3.29 | 1.88 | 2.92 | 2.43 | 3.42 | 5.24 | 0.42 | 11 | 2.53E−03 | 1.41 | 2.7 |
| 3p | 3p_st2 | | | | | | | | | | | | | | | | | | | | | |
| hsa-miR-299- | hsa-asg-10378_st1 | 4.36 | 4.02 | 3.80 | 4.06 | 0.28 | 0 | 3.23 | 1.93 | 2.45 | 1.97 | 1.60 | 3.20 | 3.53 | 3.66 | 3.42 | 8.13 | 0.90 | 100 | 2.27E−02 | 1.29 | 2.4 |
| 3p | | | | | | | | | | | | | | | | | | | | | | |
| hsa-miR-450 | hsa-asg-14228_st2 | 4.59 | 3.78 | 4.29 | 4.22 | 0.41 | 0 | 2.43 | 3.01 | 2.53 | 3.13 | 2.92 | 2.93 | 2.74 | 3.56 | 2.16 | 6.83 | 1.58 | 33 | 4.90E−04 | 1.39 | 2.6 |
| hsa-miR-450 | hsa-miR-450_st2 | 5.07 | 4.87 | 4.35 | 4.76 | 0.37 | 0 | 2.86 | 3.91 | 3.63 | 4.03 | 4.20 | 4.47 | 4.07 | 4.24 | 2.71 | 5.40 | 0.40 | 67 | 2.99E−02 | 0.97 | 2.0 |
| hsa-asg- | hsa-asg-13471_st1 | 6.06 | 5.72 | 6.30 | 6.03 | 0.29 | 100 | 4.39 | 5.12 | 5.35 | 5.40 | 4.38 | 4.07 | 3.53 | 4.76 | 4.76 | 5.04 | 0.44 | 67 | 4.19E−03 | 1.39 | 2.6 |
| 13471 | | | | | | | | | | | | | | | | | | | | | | |
| hsa-miR-27a | hsa-miR-27a_st2 | 12.5 | 12.3 | 12.5 | 12.4 | 0.12 | 100 | 11.0 | 12.0 | 11.5 | 10.6 | 10.6 | 10.2 | 11.1 | 11.3 | 11.0 | 5.78 | 0.87 | 56 | 1.67E−03 | 1.39 | 2.6 |
| hsa-asg-9547 | hsa-asg-9547_st2 | 5.05 | 5.60 | 5.51 | 5.39 | 0.30 | 33 | 3.79 | 3.34 | 3.44 | 3.91 | 3.40 | 4.28 | 5.35 | 3.56 | 4.95 | 8.49 | 0.88 | 100 | 1.02E−02 | 1.39 | 2.6 |
| hsa-cand22 | hsa-cand22_st2 | 7.39 | 6.05 | 7.90 | 7.11 | 0.96 | 100 | 6.43 | 6.81 | 5.35 | 5.37 | 5.82 | 5.67 | 3.77 | 6.14 | 6.20 | 5.57 | 0.42 | 11 | 4.29E−02 | 1.38 | 2.6 |
| hsa-asg-3711 | hsa-asg-3711_st2 | 6.20 | 6.43 | 7.09 | 6.57 | 0.46 | 100 | 5.12 | 5.53 | 5.14 | 5.25 | 4.54 | 4.44 | 4.87 | 5.70 | 6.17 | 4.15 | 0.51 | 78 | 3.11E−03 | 1.38 | 2.6 |
| hsa-miR-152 | hsa-miR-152_st1 | 12.5 | 12.5 | 12.6 | 12.5 | 0.10 | 100 | 10.9 | 12.2 | 11.6 | 11.1 | 10.8 | 9.75 | 10.5 | 12.0 | 11.7 | 8.29 | 0.55 | 100 | 1.54E−02 | 1.37 | 2.6 |
| hsa-miR-27b | hsa-miR-27b_st1 | 13.6 | 13.5 | 13.7 | 13.6 | 0.10 | 100 | 12.0 | 13.2 | 12.8 | 11.9 | 11.9 | 11.0 | 12.5 | 12.5 | 12.3 | 5.21 | 0.40 | 11 | 5.00E−03 | 1.37 | 2.6 |
| hsa-asg-2391 | hsa-asg-2391_st2 | 4.36 | 4.17 | 4.03 | 4.19 | 0.17 | 0 | 3.06 | 2.85 | 2.01 | 3.69 | 2.64 | 2.08 | 2.54 | 3.33 | 3.16 | 5.83 | 0.44 | 78 | 2.29E−03 | 1.37 | 2.6 |
| Has-miR257 | hsa-miR257_st1 | 10.2 | 9.85 | 10.5 | 10.1 | 0.33 | 100 | 9.23 | 9.55 | 8.87 | 8.54 | 8.50 | 8.15 | 7.91 | 9.62 | 9.10 | 3.12 | 0.59 | 0 | 4.28E−03 | 1.36 | 2.6 |
| hsa-miR-340 | hsa-miR-340_st1 | 6.07 | 5.55 | 6.59 | 6.07 | 0.52 | 100 | 5.24 | 5.71 | 4.89 | 4.46 | 4.49 | 3.99 | 2.74 | 5.83 | 4.99 | 4.87 | 0.34 | 0 | 4.18E−02 | 1.36 | 2.6 |
| hsa-asg-360 | hsa-asg-360_st2 | 5.01 | 6.05 | 5.88 | 5.65 | 0.56 | 67 | 4.02 | 5.45 | 4.77 | 3.64 | 4.00 | 4.35 | 4.32 | 4.49 | 3.53 | 5.80 | 0.74 | 22 | 5.70E−03 | 1.36 | 2.6 |
| hsa-asg-1203 | hsa-asg-1203_st1 | 4.91 | 5.14 | 5.23 | 5.09 | 0.16 | 33 | 2.66 | 3.82 | 4.21 | 4.55 | 3.93 | 3.74 | 1.86 | 4.49 | 4.37 | 10.5 | 0.73 | 100 | 3.14E−02 | 1.36 | 2.6 |
| hsa-asg- | hsa-asg-10679_st2 | 4.59 | 4.82 | 5.02 | 4.81 | 0.22 | 0 | 3.67 | 4.76 | 3.39 | 2.69 | 3.17 | 3.32 | 3.09 | 4.09 | 3.02 | 7.10 | 0.46 | 100 | 5.45E−03 | 1.34 | 2.5 |
| 10679 | | | | | | | | | | | | | | | | | | | | | | |
| hsa-asg-9069 | hsa-asg-9069_st2 | 5.82 | 5.57 | 4.35 | 5.25 | 0.79 | 67 | 3.91 | 3.87 | 2.97 | 4.14 | 4.27 | 3.91 | 4.07 | 4.09 | 3.92 | 4.22 | 0.51 | 78 | 2.04E−03 | 1.34 | 2.5 |
| Has-cand581 | hsa-cand581_st1 | 4.91 | 4.78 | 4.56 | 4.75 | 0.18 | 0 | 3.67 | 3.91 | 3.72 | 2.69 | 3.85 | 2.45 | 3.25 | 3.85 | 3.64 | 6.31 | 0.99 | 89 | 2.48E−03 | 1.30 | 2.5 |
| hsa-miR-454- | hsa-asg-11541_st2 | 9.48 | 8.89 | 9.77 | 9.38 | 0.45 | 100 | 8.53 | 8.45 | 7.87 | 7.92 | 7.91 | 7.33 | 7.81 | 8.63 | 8.31 | 6.77 | 0.95 | 78 | 1.09E−03 | 1.29 | 2.5 |
| 3p | | | | | | | | | | | | | | | | | | | | | | |
| hsa-miR-454- | hsa-asg-13305_st1 | 10.0 | 9.36 | 10.3 | 9.92 | 0.51 | 100 | 9.24 | 9.13 | 8.55 | 8.77 | 8.57 | 7.82 | 8.33 | 9.63 | 8.98 | 5.33 | 0.51 | 67 | 9.32E−03 | 1.14 | 2.2 |
| 3p | | | | | | | | | | | | | | | | | | | | | | |
| hsa-asg-3821 | hsa-asg-3821_st2 | 5.47 | 5.57 | 5.48 | 5.51 | 0.05 | 33.3 | 3.38 | 4.63 | 3.09 | 5.11 | 4.20 | 4.14 | 4.78 | 3.45 | 5.19 | 4.70 | 0.35 | 0 | 0.018934 | 1.28 | 2.44 |
| hsa-miR-10a | hsa-miR-10a_st1 | 12.2 | 12.4 | 12.4 | 12.3 | 0.12 | 100 | 11.2 | 11.7 | 11.3 | 10.5 | 11.2 | 9.98 | 10.9 | 12.0 | 11.0 | 5.21 | 0.51 | 44 | 5.38E−03 | 1.29 | 2.4 |
| hsa-asg-6160 | hsa-asg-6160_st1 | 3.91 | 3.08 | 2.85 | 3.28 | 0.56 | 0 | 2.18 | 2.77 | 2.11 | 1.01 | 1.25 | 1.11 | 2.33 | 3.45 | 1.75 | 4.84 | 0.43 | 11 | 3.03E−02 | 1.29 | 2.4 |
| hsa-miR-148b | hsa-miR-148b_st2 | 10.4 | 10.2 | 10.6 | 10.4 | 0.19 | 100 | 9.44 | 10.0 | 9.63 | 8.27 | 9.09 | 8.14 | 9.14 | 10.4 | 8.79 | 4.41 | 0.82 | 11 | 1.22E−02 | 1.28 | 2.4 |
| hsa-miR-28 | hsa-miR-28_st1 | 11.7 | 11.5 | 11.8 | 11.7 | 0.16 | 100 | 10.0 | 11.0 | 10.8 | 10.1 | 10.1 | 9.40 | 10.5 | 11.1 | 10.7 | 4.60 | 1.26 | 0 | 4.02E−03 | 1.27 | 2.4 |
| hsa-miR-324- | hsa-miR-324- | 9.16 | 9.00 | 9.49 | 9.22 | 0.25 | 100 | 8.33 | 8.27 | 7.80 | 7.42 | 7.82 | 7.87 | 7.98 | 7.92 | 8.13 | 5.22 | 0.58 | 11 | 3.47E−05 | 1.27 | 2.4 |
| 5p | 5p_st1 | | | | | | | | | | | | | | | | | | | | | |
| hsa-asg-1221 | hsa-asg-1221_st2 | 4.87 | 5.21 | 4.35 | 4.81 | 0.44 | 33 | 4.39 | 4.23 | 3.77 | 3.13 | 2.64 | 2.93 | 3.53 | 4.02 | 3.29 | 4.60 | 0.41 | 0 | 7.81E−03 | 1.26 | 2.4 |
| hsa-asg- | hsa-asg-13350_st2 | 9.37 | 9.75 | 10.5 | 9.88 | 0.58 | 100 | 8.31 | 8.84 | 8.61 | 8.88 | 8.30 | 8.27 | 8.07 | 9.29 | 9.08 | 6.10 | 0.99 | 67 | 2.06E−03 | 1.25 | 2.4 |
| 13350 | | | | | | | | | | | | | | | | | | | | | | |
| hsa-miR-99b | hsa-miR-99b_st1 | 11.8 | 11.5 | 11.9 | 11.7 | 0.21 | 100 | 10.5 | 11.4 | 11.1 | 10.1 | 10.1 | 9.52 | 10.3 | 11.0 | 10.5 | 3.02 | 0.78 | 0 | 6.10E−03 | 1.24 | 2.4 |
| hsa-miR-99b | hsa-asg-14196_st2 | 11.9 | 11.7 | 12.0 | 11.9 | 0.18 | 100 | 10.6 | 11.6 | 11.3 | 10.3 | 10.3 | 9.55 | 10.5 | 11.2 | 10.6 | 8.67 | 0.42 | 100 | 1.05E−02 | 1.22 | 2.3 |
| hsa-asg- | hsa-asg-14048_st1 | 5.40 | 5.86 | 5.29 | 5.52 | 0.30 | 67 | 3.54 | 3.63 | 5.03 | 3.26 | 4.59 | 5.15 | 4.07 | 4.43 | 4.95 | 5.31 | 0.50 | 22 | 1.73E−02 | 1.22 | 2.3 |
| 14048 | | | | | | | | | | | | | | | | | | | | | | |
| hsa-miR-641 | hsa-miR-641_st1 | 4.80 | 3.69 | 4.46 | 4.32 | 0.57 | 0 | 3.79 | 2.77 | 2.19 | 3.54 | 3.68 | 2.62 | 2.33 | 4.09 | 2.87 | 4.70 | 0.67 | 22 | 2.11E−02 | 1.22 | 2.3 |
| hsa-asg-9050 | hsa-asg-9050_st1 | 8.02 | 8.50 | 9.64 | 8.72 | 0.83 | 100 | 6.93 | 7.54 | 7.54 | 7.69 | 6.71 | 7.56 | 7.31 | 8.14 | 8.14 | 2.75 | 0.72 | 0 | 9.54E−03 | 1.21 | 2.3 |
| Has-cand821 | hsa-cand821_st1 | 4.78 | 4.48 | 4.75 | 4.67 | 0.17 | 0 | 3.23 | 4.00 | 4.24 | 3.37 | 2.64 | 3.44 | 3.39 | 3.76 | 3.02 | 8.90 | 0.56 | 100 | 2.16E−03 | 1.21 | 2.3 |
| hsa-miR-132 | hsa-miR-132_st1 | 9.20 | 9.43 | 9.98 | 9.54 | 0.41 | 100 | 8.33 | 8.35 | 8.59 | 8.08 | 8.02 | 8.44 | 6.88 | 9.72 | 8.56 | 2.91 | 0.77 | 0 | 2.42E−02 | 1.21 | 2.3 |
| hsa-asg-9951 | hsa-asg-9951_st2 | 5.52 | 5.14 | 4.91 | 5.19 | 0.30 | 67 | 3.91 | 4.95 | 4.39 | 3.59 | 1.97 | 4.47 | 3.87 | 4.81 | 3.92 | 5.32 | 0.37 | 11 | 4.81E−02 | 1.20 | 2.3 |
| hsa-miR-19b | hsa-miR-19b_st2 | 8.81 | 8.31 | 8.88 | 8.67 | 0.31 | 100 | 7.31 | 8.03 | 8.04 | 6.51 | 6.91 | 6.53 | 7.20 | 8.38 | 8.32 | 2.14 | 0.64 | 0 | 2.41E−02 | 1.20 | 2.3 |
| hsa-miR-514 | hsa-miR-514_st1 | 3.29 | 2.73 | 2.85 | 2.96 | 0.29 | 0 | 2.43 | 1.72 | 1.11 | 1.58 | 0.91 | 2.45 | 2.10 | 2.05 | 1.54 | 5.09 | 0.50 | 11 | 5.16E−03 | 1.19 | 2.3 |
| hsa-miR-374 | hsa-miR-374_st2 | 8.29 | 6.84 | 8.15 | 7.76 | 0.80 | 100 | 6.51 | 8.11 | 7.01 | 5.65 | 6.50 | 5.99 | 6.37 | 7.01 | 5.98 | 5.35 | 0.55 | 33 | 3.86E−02 | 1.19 | 2.3 |
| hsa-miR-382 | hsa-miR-382_st1 | 7.58 | 8.10 | 8.04 | 7.91 | 0.29 | 100 | 7.35 | 7.13 | 7.43 | 6.56 | 6.29 | 5.93 | 5.81 | 7.17 | 6.84 | 10.9 | 0.36 | 100 | 9.71E−03 | 1.19 | 2.3 |
| hsa-miR-154* | hsa-miR-154-_st2 | 5.07 | 6.07 | 5.41 | 5.51 | 0.51 | 67 | 4.21 | 4.99 | 4.63 | 3.95 | 4.27 | 3.20 | 4.40 | 5.83 | 3.53 | 4.28 | 0.68 | 0 | 3.63E−02 | 1.18 | 2.3 |
| hsa-miR-599 | hsa-miR-599_st2 | 4.48 | 4.68 | 4.65 | 4.61 | 0.11 | 0 | 3.39 | 4.71 | 3.44 | 3.37 | 4.07 | 1.88 | 2.92 | 3.66 | 3.53 | 9.79 | 0.58 | 89 | 3.04E−02 | 1.16 | 2.2 |
| hsa-asg-8511 | hsa-asg-8511_st2 | 3.56 | 4.45 | 5.57 | 4.52 | 1.01 | 0 | 2.86 | 3.57 | 1.92 | 3.78 | 2.92 | 4.07 | 3.53 | 3.66 | 3.92 | 7.59 | 0.85 | 89 | 4.32E−02 | 1.16 | 2.2 |
| hsa-asg- | hsa-asg-11688_st1 | 4.36 | 4.30 | 3.80 | 4.15 | 0.31 | 0 | 2.66 | 2.33 | 2.61 | 4.10 | 2.32 | 3.83 | 2.10 | 3.33 | 3.92 | 6.80 | 1.32 | 100 | 3.78E−02 | 1.13 | 2.2 |
| 11688 | | | | | | | | | | | | | | | | | | | | | | |
| hsa-asg-3340 | hsa-asg-3340_st2 | 7.72 | 7.45 | 9.04 | 8.07 | 0.85 | 100 | 6.10 | 6.92 | 7.19 | 6.82 | 6.60 | 6.86 | 6.89 | 7.52 | 7.52 | 4.36 | 0.65 | 22 | 1.16E−02 | 1.13 | 2.2 |
| hsa-asg- | hsa-asg-13074_st2 | 5.37 | 4.58 | 4.75 | 4.90 | 0.42 | 33 | 3.67 | 4.66 | 2.97 | 3.26 | 3.40 | 3.83 | 3.65 | 4.49 | 4.00 | 3.80 | 1.12 | 0 | 9.27E−03 | 1.13 | 2.2 |
| 13074 | | | | | | | | | | | | | | | | | | | | | | |
| hsa-asg- | hsa-asg-13646_st1 | 8.96 | 7.96 | 8.22 | 8.38 | 0.52 | 100 | 6.97 | 7.98 | 6.55 | 7.56 | 6.68 | 6.07 | 7.12 | 8.24 | 8.13 | 1.96 | 0.68 | 0 | 4.20E−02 | 1.12 | 2.2 |
| 13646 | | | | | | | | | | | | | | | | | | | | | | |
| hsa-miR-494 | hsa-miR-494_st1 | 7.61 | 7.92 | 7.92 | 7.81 | 0.18 | 100 | 7.22 | 6.96 | 6.63 | 7.66 | 5.73 | 5.86 | 6.60 | 6.40 | 7.30 | 10.7 | 0.67 | 100 | 1.77E−02 | 1.11 | 2.2 |
| hsa-miR-494 | hsa-miR61_st2 | 7.01 | 7.33 | 7.50 | 7.28 | 0.25 | 100 | 6.85 | 6.43 | 6.38 | 7.10 | 5.40 | 5.79 | 6.89 | 6.83 | 6.55 | 2.11 | 0.39 | 0 | 3.77E−02 | 0.81 | 1.8 |
| hsa-asg-9053 | hsa-asg-9053_st1 | 6.17 | 7.44 | 7.34 | 6.98 | 0.71 | 100 | 4.78 | 6.21 | 6.10 | 6.92 | 4.90 | 5.92 | 5.64 | 5.87 | 6.55 | 3.38 | 0.87 | 0 | 3.96E−02 | 1.10 | 2.1 |
| hsa-asg- | hsa-asg-10336_st1 | 5.23 | 5.68 | 4.83 | 5.24 | 0.42 | 33 | 3.54 | 4.33 | 4.63 | 3.82 | 4.38 | 3.74 | 4.07 | 4.76 | 4.00 | 5.74 | 0.33 | 56 | 2.58E−03 | 1.10 | 2.1 |
| 10336 | | | | | | | | | | | | | | | | | | | | | | |
| hsa-asg- | hsa-asg-12563_st1 | 5.79 | 4.68 | 4.46 | 4.98 | 0.71 | 33 | 4.54 | 2.85 | 4.47 | 3.13 | 3.68 | 3.44 | 3.97 | 4.17 | 4.61 | 2.20 | 0.54 | 0 | 2.99E−02 | 1.10 | 2.1 |
| 12563 | | | | | | | | | | | | | | | | | | | | | | |
| hsa-asg- | hsa-asg-10513_st1 | 5.34 | 5.28 | 4.75 | 5.12 | 0.33 | 67 | 4.47 | 4.71 | 5.19 | 2.69 | 3.40 | 3.74 | 3.65 | 4.66 | 3.74 | 5.98 | 0.52 | 89 | 4.44E−02 | 1.09 | 2.1 |
| 10513 | | | | | | | | | | | | | | | | | | | | | | |
| hsa-asg-7417 | hsa-asg-7417_st1 | 5.72 | 4.45 | 4.89 | 5.02 | 0.65 | 0 | 4.50 | 5.28 | 4.04 | 3.26 | 3.59 | 3.59 | 3.17 | 4.55 | 3.36 | 4.55 | 1.32 | 22 | 4.26E−02 | 1.09 | 2.1 |
| hsa-asg-807 | hsa-asg-807_st2 | 5.94 | 5.79 | 6.17 | 5.97 | 0.19 | 100 | 4.54 | 4.36 | 4.74 | 5.57 | 4.59 | 5.00 | 5.56 | 4.17 | 5.46 | 5.37 | 0.68 | 11 | 7.57E−03 | 1.08 | 2.1 |
| hsa-asg- | hsa-asg-10138_st1 | 9.27 | 9.62 | 10.3 | 9.74 | 0.54 | 100 | 8.28 | 9.01 | 8.62 | 8.80 | 8.07 | 8.36 | 8.44 | 9.36 | 9.10 | 4.91 | 0.48 | 56 | 5.20E−03 | 1.07 | 2.1 |
| 10138 | | | | | | | | | | | | | | | | | | | | | | |
| hsa-miR-421 | hsa-asg-5033_st2 | 9.31 | 8.84 | 9.67 | 9.27 | 0.42 | 100 | 8.48 | 8.62 | 7.79 | 8.03 | 7.78 | 8.78 | 8.07 | 8.22 | 8.12 | 4.26 | 0.56 | 0 | 1.43E−03 | 1.06 | 2.1 |
| hsa-miR-421 | hsa-miR-421-3p_st1 | 10.0 | 9.52 | 10.4 | 9.99 | 0.46 | 100 | 8.98 | 9.42 | 8.71 | 8.84 | 8.37 | 9.39 | 8.91 | 9.50 | 9.20 | 4.25 | 0.48 | 0 | 4.64E−03 | 0.95 | 1.9 |
| hsa-cand279 | hsa-cand279_st2 | 5.46 | 5.78 | 6.69 | 5.98 | 0.64 | 67 | 5.12 | 4.93 | 4.93 | 4.75 | 4.54 | 5.17 | 4.63 | 5.42 | 4.74 | 8.27 | 0.74 | 22 | 1.86E−03 | 1.06 | 2.1 |
| hsa-asg-6331 | hsa-asg-6331_st2 | 7.68 | 7.59 | 8.77 | 8.01 | 0.65 | 100 | 6.59 | 7.05 | 5.98 | 7.23 | 6.42 | 7.03 | 7.36 | 7.18 | 7.74 | 5.65 | 0.65 | 89 | 1.79E−02 | 1.06 | 2.1 |
| hsa-asg- | hsa-asg-12465_st1 | 5.73 | 5.60 | 5.46 | 5.60 | 0.14 | 67 | 4.21 | 5.39 | 5.05 | 4.46 | 4.49 | 3.20 | 4.67 | 4.81 | 4.61 | 8.83 | 0.96 | 100 | 1.63E−02 | 1.06 | 2.1 |
| 12465 | | | | | | | | | | | | | | | | | | | | | | |
| hsa-asg- | hsa-asg-12515_st2 | 4.51 | 5.33 | 5.35 | 5.06 | 0.48 | 0 | 3.06 | 4.12 | 4.60 | 4.37 | 3.68 | 4.14 | 3.77 | 4.02 | 4.30 | 4.75 | 0.59 | 22 | 6.53E−03 | 1.05 | 2.1 |
| 12515 | | | | | | | | | | | | | | | | | | | | | | |
| hsa-asg-510 | hsa-asg-510_st1 | 6.36 | 5.88 | 6.34 | 6.20 | 0.27 | 100 | 4.75 | 6.06 | 5.19 | 4.63 | 4.90 | 5.26 | 4.54 | 6.02 | 4.95 | 5.68 | 0.40 | 67 | 1.20E−02 | 1.05 | 2.1 |
| hsa-miR-134 | hsa-miR-134_st2 | 6.43 | 6.39 | 5.90 | 6.24 | 0.29 | 67 | 5.99 | 5.85 | 5.70 | 4.21 | 4.73 | 4.31 | 5.02 | 5.11 | 5.78 | 4.95 | 0.40 | 11 | 2.94E−02 | 1.05 | 2.1 |
| hsa-asg-6803 | hsa-asg-6803_st1 | 4.82 | 5.28 | 5.13 | 5.08 | 0.23 | 67 | 3.67 | 4.49 | 4.63 | 4.18 | 3.17 | 3.54 | 4.16 | 5.03 | 3.42 | 5.48 | 0.50 | 11 | 1.94E−02 | 1.05 | 2.1 |
| hsa-asg- | hsa-asg-10830_st2 | 4.91 | 5.07 | 4.91 | 4.96 | 0.09 | 0 | 3.67 | 3.91 | 3.93 | 4.49 | 3.40 | 3.64 | 3.87 | 4.37 | 4.00 | 6.40 | 2.06 | 78 | 5.19E−04 | 1.04 | 2.1 |
| 10830 | | | | | | | | | | | | | | | | | | | | | | |
| hsa-miR-30a- | hsa-miR-30a-5p_st2 | 12.9 | 12.7 | 13.0 | 12.9 | 0.13 | 100 | 11.9 | 12.5 | 12.1 | 11.7 | 11.5 | 10.8 | 11.8 | 12.2 | 12.1 | 7.76 | 0.69 | 100 | 4.79E−03 | 1.04 | 2.1 |
| 5p | | | | | | | | | | | | | | | | | | | | | | |
| hsa-asg- | hsa-asg-10626_st2 | 5.72 | 6.21 | 5.75 | 5.89 | 0.27 | 100 | 4.61 | 5.37 | 4.99 | 4.31 | 4.86 | 4.28 | 5.00 | 5.14 | 5.19 | 9.80 | 0.95 | 100 | 1.73E−03 | 1.03 | 2.0 |
| 10626 | | | | | | | | | | | | | | | | | | | | | | |
| hsa-asg- | hsa-asg-14138_st2 | 5.90 | 5.95 | 5.94 | 5.93 | 0.03 | 33 | 5.35 | 5.50 | 4.91 | 5.32 | 4.14 | 3.95 | 4.57 | 5.78 | 4.58 | 5.39 | 0.49 | 33 | 2.10E−02 | 1.03 | 2.0 |
| 14138 | | | | | | | | | | | | | | | | | | | | | | |
| hsa-asg- | hsa-asg-13011_st2 | 5.60 | 5.28 | 6.16 | 5.68 | 0.44 | 100 | 4.54 | 5.96 | 4.85 | 4.49 | 4.33 | 3.99 | 4.16 | 5.03 | 4.55 | 8.03 | 0.95 | 100 | 2.08E−02 | 1.02 | 2.0 |
| 13011 | | | | | | | | | | | | | | | | | | | | | | |
| hsa-asg-4513 | hsa-asg-4513_st2 | 5.14 | 4.95 | 4.29 | 4.79 | 0.45 | 0 | 4.30 | 3.01 | 3.44 | 4.18 | 4.14 | 3.44 | 3.77 | 3.21 | 4.49 | 5.56 | 0.48 | 22 | 1.37E−02 | 1.02 | 2.0 |
| hsa-asg-3224 | hsa-asg-3224_st1 | 5.37 | 5.34 | 4.91 | 5.21 | 0.26 | 67 | 4.47 | 4.49 | 4.42 | 4.37 | 3.50 | 3.64 | 4.32 | 4.81 | 3.83 | 8.18 | 0.65 | 100 | 4.38E−03 | 1.00 | 2.0 |
| hsa-miR-324- | hsa-miR-324- | 8.32 | 8.09 | 8.66 | 8.36 | 0.29 | 0 | 7.35 | 8.09 | 7.56 | 6.92 | 7.41 | 6.65 | 7.27 | 7.66 | 7.30 | 7.37 | 0.66 | 44 | 3.35E−03 | 1.00 | 2.0 |
| 3p | 3p_st1 | | | | | | | | | | | | | | | | | | | | | |

SD, standard deviation;
%, percentage of samples expressing miRNA above background levels;
Log2Diff, difference in VSN-transformed expression between ESO and LNneg samples.

### Example 22

### miRNAs Differentally Expressed Between Normal Liver Tissue and Normal Lymph Nodes

[0304] To identify miRNAs that may be useful markers for metastasis of cancerous liver cells to lymph nodes, the inventors identified miRNAs that are expressed at significantly higher levels in normal liver tissue than in cancer-negative lymph nodes.

[0305] Total RNA, purified from three separate normal human liver tissue samples (FirstChoice® Human Liver Total RNA, cat. no. AM7960; Ambion, Austin, Tex., USA) and from nine normal human lymph node samples (FirstChoice® Human Lymph Node Total RNA, cat. no. AM7894; Ambion, Austin, Tex., USA) was purchased from Ambion. miRNA purification and labeling and microarray expression analyses were performed as described above in Example 2.

[0306] The inventors identified 198 miRNAs (51 verified, 147 predicted) with significant differential expression between normal liver and normal lymph node samples (log 2Diff liver vs LN neg≧1 and p-value<0.05) (Table 21). Among the verified miRNAs, hsa-miR-122a had an average expression level over 300-fold higher in liver samples; hsa-miR-375 had an average expression level over 50-fold higher in liver samples; four miRNAs (hsa-miR-215, -194, -483, and -192) had average expression levels that were between 15- and 25-fold higher in liver samples; and nine miRNAs (hsa-miR-200b, -592, -429, -139, -203, -200a, -19a, -148a, and -493-5p) had average expression levels that were between 5- and 10-fold higher in liver samples. Among the predicted miRNAs, hsa-asg-14182_st1 had an average expression level over 40-fold higher in liver samples; eight miRNAs (hsa-asg-1035_st2, -9663_st1, -11391_st1, -3922_st2, -2303_st1, -14208 st1, -11425_st1, -and -8128 st1) had average expression levels that were between 10- and 30-fold higher in liver samples; and 30 additional miRNAs had average expression levels that were between 5- and 10-fold higher in liver samples than in normal lymph node samples.

TABLE 21
MicroRNAs Differentially Expressed Between Normal Liver Samples (LIV) and Cancer-Negative Lymph Node Samples
(LNneg) from Patients.

| | | LIV | | | | | | LNneg | | | | | | | | | | | | | | |
|---|---|---|---|---|---|---|---|---|---|---|---|---|---|---|---|---|---|---|---|---|---|---|
| MicroRNA | Probe ID | 1 | 2 | 3 | M | SD | % | 1 | 2 | 3 | 4 | 5 | 6 | 7 | 8 | 9 | M | SD | % | ttest | log2Diff | Fold |
| hsa-miR-122a | hsa-miR-122a_st1 | 14.4 | 14.5 | 14.5 | 14.5 | 0.06 | 100 | 8.57 | 6.20 | 6.41 | 4.26 | 7.93 | 3.82 | 1.42 | 4.58 | 10.8 | 6.01 | 2.85 | 44 | 5.45E−04 | 8.49 | 360. |
| hsa-miR- | hsa-miR- | 10.1 | 11.4 | 9.89 | 10.4 | 0.83 | 100 | 5.96 | 4.93 | 6.23 | 2.85 | 2.97 | 3.69 | 0.99 | 4.63 | 6.39 | 4.29 | 1.82 | 0 | 2.41E−04 | 6.19 | 72.9 |
| 375 | 375_st1 | | | | | | | | | | | | | | | | | | | | | |
| hsa-asg- | hsa-asg- | 6.74 | 8.10 | 7.59 | 7.48 | 0.69 | 100 | 2.43 | 0.95 | 1.92 | 1.82 | 2.61 | 1.78 | 2.78 | 1.88 | 0.73 | 1.88 | 0.69 | 0 | 2.66E−07 | 5.60 | 48.3 |
| 14182 | 14182_st1 | | | | | | | | | | | | | | | | | | | | | |
| hsa-asg- | hsa-asg- | 7.20 | 7.10 | 7.12 | 7.14 | 0.05 | 100 | 3.07 | 1.54 | 3.23 | 2.69 | 2.61 | 1.97 | 2.15 | 1.88 | 2.92 | 2.45 | 0.59 | 0 | 1.06E−07 | 4.69 | 25.8 |
| 1035 | 1035_st2 | | | | | | | | | | | | | | | | | | | | | |
| hsa-asg- | hsa-asg- | 6.83 | 6.71 | 7.11 | 6.88 | 0.21 | 100 | 2.25 | 1.96 | 1.66 | 1.31 | 2.97 | 2.35 | 1.97 | 2.93 | 3.39 | 2.31 | 0.68 | 0 | 5.61E−07 | 4.57 | 23.8 |
| 9663 | 9663_st1 | | | | | | | | | | | | | | | | | | | | | |
| hsa-miR- | hsa-miR- | 10.0 | 10.5 | 10.0 | 10.2 | 0.27 | 100 | 6.96 | 5.82 | 5.71 | 6.66 | 5.54 | 4.84 | 5.51 | 5.11 | 5.23 | 5.71 | 0.70 | 33 | 9.04E−07 | 4.50 | 22.7 |
| 215 | 215_st1 | | | | | | | | | | | | | | | | | | | | | |
| hsa-miR- | hsa-miR- | 13.0 | 13.3 | 13.2 | 13.2 | 0.14 | 100 | 9.83 | 9.37 | 8.91 | 9.35 | 8.95 | 8.34 | 8.55 | 8.21 | 9.05 | 8.95 | 0.52 | 100 | 9.09E−08 | 4.28 | 19.4 |
| 194 | 194_st2 | | | | | | | | | | | | | | | | | | | | | |
| hsa-miR- | hsa-miR- | 6.73 | 7.05 | 6.85 | 6.88 | 0.16 | 100 | 1.85 | 2.45 | 1.79 | 4.08 | 2.76 | 1.29 | 3.68 | 3.87 | 2.44 | 2.69 | 0.99 | 0 | 3.55E−05 | 4.19 | 18.2 |
| 483 | 483_st1 | | | | | | | | | | | | | | | | | | | | | |
| hsa-asg- | hsa-asg- | 6.28 | 6.02 | 6.22 | 6.17 | 0.14 | 100 | 1.45 | 1.54 | 2.43 | 2.03 | 3.44 | 1.88 | 2.64 | 2.27 | 1.62 | 2.14 | 0.64 | 0 | 9.44E−07 | 4.03 | 16.3 |
| 11391 | 11391_st1 | | | | | | | | | | | | | | | | | | | | | |
| hsa-miR- | hsa-miR- | 13.5 | 13.7 | 13.7 | 13.6 | 0.11 | 100 | 10.8 | 9.87 | 10.1 | 10.0 | 9.58 | 8.72 | 9.33 | 8.80 | 9.65 | 9.66 | 0.66 | 100 | 1.43E−06 | 4.01 | 16.1 |
| 192 | 192_st2 | | | | | | | | | | | | | | | | | | | | | |
| hsa-asg-3922 | hsa-asg-3922_st2 | 5.63 | 6.00 | 6.74 | 6.12 | 0.56 | 100 | 2.25 | 2.36 | 1.66 | 2.33 | 2.01 | 1.97 | 2.92 | 2.62 | 2.54 | 2.30 | 0.38 | 0 | 9.14E−08 | 3.83 | 14.2 |
| hsa-asg- | hsa-asg- | 6.16 | 5.74 | 6.06 | 5.99 | 0.22 | 100 | 2.93 | 2.54 | 2.43 | 1.82 | 2.11 | 2.99 | 2.32 | 1.29 | 2.54 | 2.33 | 0.53 | 0 | 5.34E−07 | 3.66 | 12.6 |
| 2303 | 2303_st1 | | | | | | | | | | | | | | | | | | | | | |
| hsa-asg- | hsa-asg- | 7.17 | 7.30 | 7.45 | 7.31 | 0.14 | 100 | 5.07 | 3.53 | 4.47 | 4.15 | 3.39 | 1.19 | 3.05 | 4.07 | 3.97 | 3.65 | 1.10 | 0 | 2.42E−04 | 3.65 | 12.6 |
| 14208 | 14208_st1 | | | | | | | | | | | | | | | | | | | | | |
| hsa-asg- | hsa-asg- | 5.53 | 5.64 | 6.00 | 5.72 | 0.25 | 100 | 1.65 | 2.16 | 1.92 | 2.60 | 2.37 | 1.10 | 2.64 | 2.08 | 3.09 | 2.18 | 0.59 | 0 | 1.81E−06 | 3.54 | 11.6 |
| 11425 | 11425_st1 | | | | | | | | | | | | | | | | | | | | | |
| hsa-miR- | hsa-asg- | 6.97 | 5.94 | 5.91 | 6.28 | 0.60 | 100 | 3.07 | 3.29 | 3.67 | 1.72 | 1.64 | 2.69 | 3.05 | 1.68 | 5.42 | 2.92 | 1.21 | 11 | 1.09E−03 | 3.36 | 10.3 |
| 592 | 4400_st1 | | | | | | | | | | | | | | | | | | | | | |
| hsa-miR-592 | hsa-miR-592_st1 | 6.84 | 5.25 | 6.18 | 6.09 | 0.80 | 100 | 4.31 | 2.54 | 2.86 | 3.15 | 1.83 | 1.78 | 3.05 | 2.62 | 4.54 | 2.96 | 0.96 | 0 | 4.94E−04 | 3.13 | 8.7 |
| hsa-asg- | hsa-asg- | 5.58 | 6.34 | 6.63 | 6.18 | 0.54 | 67 | 3.45 | 4.04 | 3.46 | 3.01 | 3.39 | 2.92 | 2.15 | 0.84 | 2.21 | 2.83 | 0.96 | 0 | 2.20E−04 | 3.35 | 10.2 |
| 8128 | 8128_st1 | | | | | | | | | | | | | | | | | | | | | |
| hsa-asg- | hsa-asg- | 6.69 | 5.62 | 5.96 | 6.09 | 0.55 | 33 | 4.17 | 2.71 | 5.28 | 2.93 | 3.28 | 1.58 | 2.15 | 1.11 | 2.33 | 2.84 | 1.29 | 0 | 2.00E−03 | 3.26 | 9.5 |
| 13404 | 13404_st2 | | | | | | | | | | | | | | | | | | | | | |
| hsa-asg- | hsa-asg- | 4.53 | 5.15 | 5.80 | 5.16 | 0.63 | 33 | 2.61 | 2.54 | 2.66 | 2.13 | 1.83 | 0.68 | 1.97 | 0.93 | 1.86 | 1.91 | 0.71 | 0 | 3.51E−05 | 3.25 | 9.5 |
| 519 | 519_st1 | | | | | | | | | | | | | | | | | | | | | |
| hsa-asg- | hsa-asg- | 5.98 | 6.34 | 6.16 | 6.16 | 0.18 | 100 | 2.78 | 2.36 | 2.66 | 2.03 | 3.97 | 2.92 | 2.92 | 2.78 | 4.24 | 2.96 | 0.71 | 0 | 2.09E−05 | 3.20 | 9.2 |
| 7438 | 7438_st2 | | | | | | | | | | | | | | | | | | | | | |
| hsa-miR-200b | hsa-miR-200b_st1 | 10.6 | 11.2 | 10.6 | 10.8 | 0.35 | 100 | 7.62 | 7.80 | 8.90 | 6.69 | 6.82 | 6.87 | 6.51 | 7.65 | 10.4 | 7.70 | 1.26 | 100 | 1.87E−03 | 3.18 | 9.1 |
| hsa-asg- | hsa-asg- | 4.77 | 5.18 | 6.24 | 5.40 | 0.76 | 33 | 1.45 | 1.75 | 3.06 | 1.72 | 2.11 | 1.78 | 1.25 | 3.20 | 3.65 | 2.22 | 0.86 | 0 | 2.05E−04 | 3.18 | 9.1 |
| 11825 | 11825_st1 | | | | | | | | | | | | | | | | | | | | | |
| hsa-miR- | hsa-miR- | 5.68 | 6.28 | 5.89 | 5.95 | 0.30 | 100 | 3.45 | 1.54 | 3.67 | 2.13 | 2.37 | 2.69 | 2.32 | 2.45 | 5.39 | 2.89 | 1.14 | 0 | 1.20E−03 | 3.06 | 8.3 |
| 429 | 429_st1 | | | | | | | | | | | | | | | | | | | | | |
| hsa-asg- | hsa-asg- | 4.68 | 6.09 | 6.22 | 5.67 | 0.85 | 67 | 2.78 | 2.71 | 1.66 | 2.42 | 3.97 | 3.06 | 2.78 | 1.29 | 3.25 | 2.66 | 0.81 | 0 | 2.50E−04 | 3.01 | 8.0 |
| 8611 | 8611_st1 | | | | | | | | | | | | | | | | | | | | | |
| hsa-asg- | hsa-asg- | 6.20 | 6.43 | 6.60 | 6.41 | 0.20 | 100 | 3.45 | 4.49 | 1.66 | 4.55 | 3.59 | 4.24 | 3.85 | 2.08 | 3.09 | 3.44 | 1.02 | 0 | 6.70E−04 | 2.97 | 7.8 |
| 8616 | 8616_st2 | | | | | | | | | | | | | | | | | | | | | |
| hsa-asg- | hsa-asg- | 5.55 | 6.16 | 6.22 | 5.98 | 0.37 | 100 | 4.55 | 3.16 | 3.91 | 3.28 | 2.01 | 3.69 | 3.50 | 1.88 | 1.38 | 3.04 | 1.05 | 0 | 9.74E−04 | 2.94 | 7.7 |
| 12610 | 12610_st1 | | | | | | | | | | | | | | | | | | | | | |
| hsa-asg- | hsa-asg- | 5.50 | 6.45 | 6.81 | 6.26 | 0.68 | 100 | 4.37 | 3.29 | 2.86 | 4.81 | 3.16 | 2.85 | 2.32 | 3.07 | 3.25 | 3.33 | 0.78 | 0 | 1.80E−04 | 2.92 | 7.6 |
| 1619 | 1619_st2 | | | | | | | | | | | | | | | | | | | | | |
| hsa-asg- | hsa-asg- | 5.26 | 6.49 | 6.71 | 6.15 | 0.78 | 67 | 2.93 | 3.53 | 2.86 | 4.84 | 4.27 | 3.37 | 3.05 | 2.45 | 1.86 | 3.24 | 0.90 | 0 | 5.62E−04 | 2.91 | 7.5 |
| 13878 | 13878_st2 | | | | | | | | | | | | | | | | | | | | | |
| hsa-miR- | hsa-miR- | 11.8 | 11.9 | 11.5 | 11.7 | 0.16 | 100 | 11.0 | 9.41 | 9.55 | 9.74 | 8.45 | 8.99 | 9.36 | 7.36 | 5.92 | 8.86 | 1.48 | 100 | 8.17E−03 | 2.90 | 7.5 |
| 139 | 139_st2 | | | | | | | | | | | | | | | | | | | | | |
| hsa-asg-1270 | hsa-asg-1270_st2 | 5.84 | 6.99 | 6.84 | 6.56 | 0.63 | 100 | 4.24 | 3.64 | 1.92 | 4.08 | 4.58 | 4.89 | 3.05 | 3.32 | 3.25 | 3.66 | 0.90 | 0 | 4.82E−04 | 2.89 | 7.4 |
| hsa-asg- | hsa-asg- | 5.58 | 6.02 | 5.00 | 5.53 | 0.51 | 67 | 3.76 | 2.54 | 2.18 | 2.69 | 2.76 | 3.37 | 1.79 | 2.27 | 2.54 | 2.66 | 0.60 | 0 | 2.40E−05 | 2.88 | 7.3 |
| 5190 | 5190_st1 | | | | | | | | | | | | | | | | | | | | | |
| hsa-asg- | hsa-asg- | 5.73 | 6.01 | 5.55 | 5.76 | 0.23 | 33 | 3.56 | 3.02 | 3.23 | 2.60 | 3.04 | 3.69 | 1.08 | 3.20 | 2.74 | 2.91 | 0.77 | 0 | 1.05E−04 | 2.86 | 7.2 |
| 11995 | 11995_st1 | | | | | | | | | | | | | | | | | | | | | |
| hsa-miR- | hsa-miR- | 10.0 | 9.38 | 9.52 | 9.65 | 0.35 | 100 | 7.33 | 5.89 | 7.21 | 8.24 | 6.45 | 5.41 | 5.19 | 6.07 | 9.36 | 6.79 | 1.37 | 78 | 6.11E−03 | 2.86 | 7.2 |
| 203 | 203_st2 | | | | | | | | | | | | | | | | | | | | | |
| hsa-miR- | hsa-miR- | 8.05 | 8.74 | 8.45 | 8.41 | 0.35 | 100 | 6.27 | 5.08 | 6.49 | 5.72 | 5.29 | 4.60 | 4.07 | 4.78 | 7.78 | 5.56 | 1.14 | 67 | 1.97E−03 | 2.85 | 7.2 |
| 200a | 200a_st2 | | | | | | | | | | | | | | | | | | | | | |
| hsa-asg- | hsa-asg- | 5.53 | 5.94 | 5.23 | 5.57 | 0.36 | 100 | 3.76 | 2.87 | 3.54 | 2.51 | 2.83 | 1.97 | 2.78 | 1.68 | 2.54 | 2.72 | 0.66 | 0 | 3.82E−05 | 2.84 | 7.2 |
| 12907 | 12907_st2 | | | | | | | | | | | | | | | | | | | | | |
| hsa-asg- | hsa-asg- | 5.60 | 6.33 | 6.36 | 6.10 | 0.43 | 67 | 3.66 | 3.53 | 1.66 | 5.10 | 3.77 | 3.69 | 3.59 | 2.62 | 2.54 | 3.35 | 0.97 | 0 | 9.45E−04 | 2.75 | 6.7 |
| 10947 | 10947_st1 | | | | | | | | | | | | | | | | | | | | | |
| hsa-asg- | hsa-asg- | 5.26 | 6.13 | 6.47 | 5.95 | 0.62 | 67 | 3.93 | 3.53 | 2.66 | 3.82 | 3.93 | 2.85 | 3.50 | 2.27 | 2.54 | 3.22 | 0.65 | 0 | 8.29E−05 | 2.73 | 6.6 |
| 4283 | 4283_st2 | | | | | | | | | | | | | | | | | | | | | |
| Has- | hsa- | 6.31 | 6.20 | 6.02 | 6.18 | 0.15 | 100 | 3.85 | 2.71 | 4.93 | 3.95 | 3.63 | 2.44 | 4.27 | 2.45 | 3.09 | 3.48 | 0.87 | 0 | 3.96E−04 | 2.70 | 6.5 |
| miR202 | miR202_st2 | | | | | | | | | | | | | | | | | | | | | |
| hsa-miR- | hsa-miR- | 5.09 | 5.92 | 5.50 | 5.50 | 0.41 | 67 | 4.61 | 3.42 | 2.86 | 3.15 | 3.63 | 2.53 | 1.60 | 1.29 | 2.54 | 2.85 | 1.02 | 0 | 1.59E−03 | 2.66 | 6.3 |
| 19a | 19a_st1 | | | | | | | | | | | | | | | | | | | | | |
| hsa-asg- | hsa-asg- | 6.93 | 7.52 | 7.34 | 7.27 | 0.30 | 100 | 5.18 | 4.43 | 6.99 | 6.06 | 5.91 | 3.54 | 4.59 | 3.07 | 2.10 | 4.65 | 1.57 | 22 | 1.93E−02 | 2.61 | 6.1 |
| 5021_st1 | 5021_st1 | | | | | | | | | | | | | | | | | | | | | |
| hsa-asg- | hsa-asg- | 5.70 | 6.77 | 6.81 | 6.43 | 0.63 | 67 | 4.55 | 4.16 | 3.23 | 5.06 | 5.07 | 4.55 | 3.59 | 2.45 | 2.10 | 3.86 | 1.09 | 0 | 3.50E−03 | 2.57 | 5.9 |
| 8668 | 8668_st2 | | | | | | | | | | | | | | | | | | | | | |
| hsa-asg-7159 | hsa-asg-7159_st2 | 5.55 | 6.36 | 5.84 | 5.92 | 0.41 | 33 | 3.56 | 3.29 | 2.43 | 3.95 | 3.93 | 3.48 | 4.00 | 3.44 | 2.33 | 3.38 | 0.62 | 0 | 6.79E−05 | 2.54 | 5.8 |
| Has- | hsa- | 6.13 | 6.97 | 7.02 | 6.71 | 0.50 | 100 | 4.76 | 5.04 | 3.54 | 4.71 | 5.15 | 4.18 | 2.64 | 3.99 | 3.97 | 4.22 | 0.80 | 11 | 5.70E−04 | 2.49 | 5.6 |
| cand330 | cand330_st2 | | | | | | | | | | | | | | | | | | | | | |
| hsa-asg- | hsa-asg- | 6.04 | 6.14 | 6.79 | 6.32 | 0.41 | 100 | 4.71 | 5.40 | 1.66 | 4.84 | 5.58 | 5.17 | 4.07 | 2.27 | 1.38 | 3.90 | 1.67 | 0 | 3.61E−02 | 2.43 | 5.4 |
| 13922 | 13922_st1 | | | | | | | | | | | | | | | | | | | | | |
| hsa-miR- | hsa-miR- | 12.8 | 13.1 | 13.0 | 13.0 | 0.13 | 100 | 12.1 | 11.1 | 11.5 | 10.5 | 10.2 | 11.0 | 10.2 | 9.18 | 9.38 | 10.6 | 0.96 | 100 | 1.85E−03 | 2.42 | 5.3 |
| 148a | 148a_st1 | | | | | | | | | | | | | | | | | | | | | |
| hsa-asg- | hsa-asg- | 5.67 | 6.62 | 6.33 | 6.21 | 0.49 | 67 | 4.49 | 4.27 | 2.76 | 4.93 | 4.53 | 5.27 | 2.32 | 2.53 | 3.17 | 3.81 | 1.11 | 0 | 5.46E−03 | 2.40 | 5.3 |
| 3185 | 3185_st1 | | | | | | | | | | | | | | | | | | | | | |
| hsa-asg-12666 | hsa-asg-12666_st2 | 7.19 | 7.54 | 6.93 | 7.22 | 0.31 | 100 | 6.08 | 4.66 | 4.87 | 4.91 | 4.65 | 4.60 | 4.82 | 3.99 | 4.84 | 4.83 | 0.55 | 11 | 3.38E−05 | 2.40 | 5.3 |
| hsa-miR- | hsa-miR-493- | 7.00 | 7.32 | 6.92 | 7.08 | 0.21 | 100 | 4.37 | 3.83 | 6.88 | 6.18 | 6.33 | 3.69 | 4.38 | 1.88 | 4.60 | 4.68 | 1.56 | 33 | 2.81E−02 | 2.40 | 5.3 |
| 493-5p | 5p_st1 | | | | | | | | | | | | | | | | | | | | | |
| hsa-asg- | hsa-asg- | 4.18 | 5.66 | 5.91 | 5.25 | 0.94 | 67 | 3.76 | 4.23 | 2.18 | 2.85 | 2.01 | 2.99 | 2.78 | 2.62 | 2.54 | 2.89 | 0.71 | 0 | 8.92E−04 | 2.37 | 5.2 |
| 2844 | 2844_st1 | | | | | | | | | | | | | | | | | | | | | |
| hsa-asg-13471 | hsa-asg-13471_st1 | 6.36 | 7.27 | 7.36 | 7.00 | 0.56 | 100 | 4.76 | 4.76 | 4.39 | 5.12 | 5.35 | 5.40 | 4.38 | 4.07 | 3.53 | 4.64 | 0.61 | 11 | 1.59E−04 | 2.36 | 5.1 |
| hsa-asg- | hsa-asg- | 6.69 | 6.02 | 7.31 | 6.67 | 0.64 | 100 | 4.17 | 3.83 | 4.61 | 5.23 | 4.45 | 4.75 | 4.49 | 3.44 | 3.87 | 4.32 | 0.55 | 0 | 9.73E−05 | 2.36 | 5.1 |
| 8266 | 8266_st2 | | | | | | | | | | | | | | | | | | | | | |
| hsa-asg-1268 | hsa-asg-1268_st1 | 6.20 | 5.86 | 6.06 | 6.04 | 0.17 | 100 | 4.76 | 3.29 | 4.02 | 4.15 | 3.49 | 3.78 | 3.85 | 2.27 | 3.65 | 3.70 | 0.68 | 0 | 1.93E−04 | 2.35 | 5.1 |
| hsa-asg- | hsa-asg- | 7.06 | 7.58 | 7.06 | 7.23 | 0.30 | 100 | 5.60 | 5.37 | 6.65 | 5.89 | 5.90 | 4.03 | 4.73 | 2.45 | 3.39 | 4.89 | 1.36 | 56 | 1.68E−02 | 2.34 | 5.1 |
| 13254 | 13254_st1 | | | | | | | | | | | | | | | | | | | | | |
| hsa-asg- | hsa-asg- | 5.26 | 6.67 | 5.77 | 5.90 | 0.71 | 67 | 3.07 | 3.16 | 2.43 | 4.49 | 3.77 | 4.55 | 3.77 | 3.74 | 3.09 | 3.56 | 0.69 | 0 | 5.15E−04 | 2.34 | 5.1 |
| 12825 | 12825_st1 | | | | | | | | | | | | | | | | | | | | | |
| hsa-asg- | hsa-asg- | 5.96 | 5.71 | 5.43 | 5.70 | 0.26 | 33 | 3.93 | 4.63 | 1.79 | 1.31 | 5.45 | 5.35 | 1.25 | 3.49 | 3.17 | 3.37 | 1.64 | 0 | 3.90E−02 | 2.33 | 5.0 |
| 13498 | 13498_st1 | | | | | | | | | | | | | | | | | | | | | |
| hsa-asg- | hsa-asg- | 5.92 | 6.09 | 5.91 | 5.98 | 0.10 | 67 | 4.02 | 3.83 | 4.39 | 3.87 | 3.72 | 3.54 | 2.92 | 2.93 | 3.77 | 3.66 | 0.48 | 0 | 1.11E−05 | 2.31 | 5.0 |
| 6642 | 6642_st2 | | | | | | | | | | | | | | | | | | | | | |
| hsa-asg- | hsa-asg- | 7.69 | 6.89 | 7.36 | 7.32 | 0.40 | 100 | 6.35 | 4.81 | 6.11 | 6.00 | 4.42 | 5.17 | 4.20 | 4.83 | 3.25 | 5.02 | 1.01 | 56 | 3.86E−03 | 2.30 | 4.9 |
| 2381 | 2381_st2 | | | | | | | | | | | | | | | | | | | | | |
| hsa-asg- | hsa-asg- | 5.16 | 6.48 | 6.41 | 6.02 | 0.74 | 67 | 4.49 | 4.37 | 2.66 | 3.82 | 4.21 | 4.55 | 3.93 | 3.74 | 1.86 | 3.74 | 0.91 | 0 | 2.93E−03 | 2.28 | 4.9 |
| 1203 | 1203_st1 | | | | | | | | | | | | | | | | | | | | | |
| hsa-asg- | hsa-asg- | 5.20 | 5.92 | 5.40 | 5.51 | 0.37 | 33 | 3.76 | 4.00 | 2.86 | 2.93 | 3.63 | 4.34 | 2.92 | 1.88 | 2.74 | 3.23 | 0.76 | 0 | 6.57E−04 | 2.28 | 4.8 |
| 4472 | 4472_st2 | | | | | | | | | | | | | | | | | | | | | |
| hsa-asg- | hsa-asg- | 4.42 | 5.71 | 5.72 | 5.28 | 0.74 | 33 | 2.93 | 3.83 | 3.06 | 3.68 | 2.01 | 3.19 | 3.05 | 2.78 | 2.54 | 3.01 | 0.55 | 0 | 1.87E−04 | 2.28 | 4.8 |
| 2845 | 2845_st2 | | | | | | | | | | | | | | | | | | | | | |
| hsa-asg- | hsa-asg- | 6.88 | 7.28 | 6.89 | 7.02 | 0.23 | 100 | 5.11 | 4.76 | 4.81 | 5.06 | 4.36 | 4.68 | 4.82 | 4.52 | 4.73 | 4.76 | 0.23 | 0 | 4.68E−08 | 2.25 | 4.8 |
| 10775_st2 | 10775_st2 | | | | | | | | | | | | | | | | | | | | | |
| hsa-asg- | hsa-asg- | 4.48 | 5.80 | 4.49 | 4.92 | 0.76 | 33 | 2.78 | 2.36 | 3.39 | 2.33 | 3.04 | 2.99 | 3.29 | 2.27 | 2.10 | 2.73 | 0.48 | 0 | 1.24E−04 | 2.20 | 4.6 |
| 11040 | 11040_st2 | | | | | | | | | | | | | | | | | | | | | |
| hsa-asg- | hsa-asg- | 5.23 | 6.27 | 6.52 | 6.01 | 0.68 | 67 | 4.09 | 3.53 | 3.06 | 4.52 | 5.17 | 3.78 | 3.17 | 3.74 | 3.39 | 3.83 | 0.68 | 0 | 7.05E−04 | 2.18 | 4.5 |
| 10236 | 10236_st2 | | | | | | | | | | | | | | | | | | | | | |
| hsa-asg- | hsa-asg- | 5.88 | 5.87 | 6.20 | 5.98 | 0.19 | 67 | 3.66 | 2.54 | 4.47 | 3.46 | 3.93 | 4.03 | 3.29 | 3.64 | 5.27 | 3.81 | 0.76 | 0 | 7.94E−04 | 2.18 | 4.5 |
| 7637 | 7637_st2 | | | | | | | | | | | | | | | | | | | | | |
| hsa-miR- | hsa-miR- | 7.70 | 8.03 | 7.59 | 7.77 | 0.23 | 100 | 6.06 | 5.84 | 6.97 | 6.90 | 6.25 | 5.40 | 4.90 | 3.74 | 4.40 | 5.61 | 1.10 | 67 | 8.28E−03 | 2.17 | 4.5 |
| 487b | 487b_st2 | | | | | | | | | | | | | | | | | | | | | |
| hsa-asg- | hsa-asg- | 4.08 | 6.34 | 4.34 | 4.92 | 1.24 | 33 | 1.25 | 2.63 | 5.30 | 4.63 | 1.83 | 2.53 | 2.92 | 1.39 | 2.44 | 2.77 | 1.38 | 0 | 3.83E−02 | 2.15 | 4.4 |
| 14065 | 14065_st2 | | | | | | | | | | | | | | | | | | | | | |
| hsa-asg- | hsa-asg- | 4.98 | 5.22 | 4.66 | 4.95 | 0.28 | 33 | 3.76 | 3.29 | 3.91 | 3.63 | 3.44 | 2.69 | 1.42 | 1.48 | 1.62 | 2.80 | 1.03 | 0 | 6.11E−03 | 2.15 | 4.4 |
| 5617 | 5617_st1 | | | | | | | | | | | | | | | | | | | | | |
| hsa-asg- | hsa-asg- | 5.36 | 6.24 | 6.86 | 6.15 | 0.76 | 67 | 4.02 | 4.30 | 3.06 | 4.12 | 4.60 | 4.37 | 3.68 | 4.14 | 3.77 | 4.01 | 0.46 | 0 | 1.22E−04 | 2.15 | 4.4 |
| 12515 | 12515_st2 | | | | | | | | | | | | | | | | | | | | | |
| hsa-asg- | hsa-asg- | 6.68 | 6.32 | 7.68 | 6.90 | 0.71 | 100 | 5.98 | 5.12 | 3.23 | 5.27 | 6.03 | 5.05 | 4.54 | 3.91 | 3.97 | 4.79 | 0.95 | 44 | 5.99E−03 | 2.11 | 4.3 |
| 13077 | 13077_st1 | | | | | | | | | | | | | | | | | | | | | |
| hsa-asg- | hsa-asg- | 6.97 | 6.98 | 7.53 | 7.16 | 0.32 | 100 | 5.75 | 5.99 | 4.78 | 5.25 | 5.49 | 6.26 | 3.05 | 5.17 | 3.92 | 5.07 | 1.03 | 22 | 7.06E−03 | 2.09 | 4.3 |
| 14148 | 14148_st2 | | | | | | | | | | | | | | | | | | | | | |
| hsa-asg- | hsa-asg- | 6.76 | 7.23 | 7.21 | 7.07 | 0.26 | 100 | 5.94 | 4.99 | 4.12 | 6.59 | 6.41 | 5.63 | 3.77 | 3.07 | 4.32 | 4.98 | 1.24 | 33 | 1.87E−02 | 2.08 | 4.2 |
| 4542 | 4542_st2 | | | | | | | | | | | | | | | | | | | | | |
| hsa-miR- | hsa-miR- | 9.87 | 10.2 | 10.2 | 10.1 | 0.22 | 100 | 9.76 | 7.76 | 8.97 | 9.69 | 7.39 | 7.36 | 7.88 | 7.63 | 6.14 | 8.06 | 1.19 | 89 | 1.62E−02 | 2.06 | 4.2 |
| 505 | 505_st1 | | | | | | | | | | | | | | | | | | | | | |
| hsa-asg- | hsa-asg- | 5.86 | 5.59 | 5.40 | 5.62 | 0.23 | 100 | 4.71 | 4.16 | 4.54 | 3.63 | 3.44 | 3.59 | 3.40 | 2.27 | 2.92 | 3.63 | 0.77 | 0 | 1.59E−03 | 1.99 | 4.0 |
| 2299 | 2299_st1 | | | | | | | | | | | | | | | | | | | | | |
| hsa- | hsa- | 10.3 | 10.7 | 10.4 | 10.4 | 0.21 | 100 | 9.47 | 8.16 | 9.72 | 9.39 | 8.42 | 7.95 | 8.50 | 7.61 | 7.41 | 8.51 | 0.84 | 100 | 2.86E−03 | 1.98 | 3.9 |
| miR157 | miR157_st2 | | | | | | | | | | | | | | | | | | | | | |
| hsa-asg- | hsa-asg- | 7.26 | 6.99 | 8.41 | 7.55 | 0.75 | 100 | 5.60 | 5.72 | 5.67 | 6.74 | 5.70 | 5.30 | 5.25 | 5.00 | 6.09 | 5.68 | 0.51 | 56 | 5.74E−04 | 1.88 | 3.7 |
| 7471 | 7471_st1 | | | | | | | | | | | | | | | | | | | | | |
| hsa-miR- | hsa-asg- | 5.39 | 5.64 | 5.34 | 5.45 | 0.16 | 100 | 3.33 | 4.30 | 3.39 | 4.00 | 4.85 | 3.69 | 2.92 | 4.07 | 1.86 | 3.60 | 0.87 | 0 | 5.23E−03 | 1.85 | 3.6 |
| 376a | 14234_st1 | | | | | | | | | | | | | | | | | | | | | |
| hsa-miR- | hsa-miR- | 5.90 | 6.26 | 6.06 | 6.08 | 0.18 | 100 | 5.14 | 4.08 | 5.49 | 5.67 | 4.85 | 4.03 | 2.48 | 3.83 | 3.77 | 4.37 | 1.01 | 0 | 1.84E−02 | 1.70 | 3.3 |
| 376a | 376a_st2 | | | | | | | | | | | | | | | | | | | | | |
| hsa-miR- | hsa-asg- | 6.40 | 6.55 | 6.50 | 6.48 | 0.07 | 100 | 5.03 | 4.91 | 6.09 | 5.56 | 5.35 | 4.10 | 3.85 | 4.14 | 4.67 | 4.85 | 0.74 | 11 | 4.22E−03 | 1.63 | 3.1 |
| 376a | 10049_st1 | | | | | | | | | | | | | | | | | | | | | |
| hsa-asg- | hsa-asg- | 5.53 | 5.51 | 6.46 | 5.83 | 0.54 | 100 | 4.76 | 4.49 | 3.23 | 4.30 | 5.75 | 4.55 | 3.77 | 3.91 | 1.38 | 4.01 | 1.21 | 11 | 3.44E−02 | 1.82 | 3.5 |
| 3081 | 3081_st1 | | | | | | | | | | | | | | | | | | | | | |
| hsa-asg- | hsa-asg- | 5.73 | 6.94 | 7.23 | 6.63 | 0.80 | 100 | 5.45 | 5.08 | 3.54 | 5.28 | 5.43 | 5.03 | 4.64 | 4.58 | 4.40 | 4.83 | 0.61 | 11 | 2.02E−03 | 1.81 | 3.5 |
| 4840 | 4840_st1 | | | | | | | | | | | | | | | | | | | | | |
| hsa-asg- | hsa-asg- | 5.47 | 5.04 | 5.50 | 5.34 | 0.25 | 33 | 4.61 | 3.92 | 4.81 | 2.51 | 4.00 | 2.17 | 3.68 | 2.27 | 3.87 | 3.54 | 0.99 | 0 | 1.27E−02 | 1.80 | 3.5 |
| 7464 | 7464_st2 | | | | | | | | | | | | | | | | | | | | | |
| hsa-asg- | hsa-asg- | 7.74 | 6.88 | 8.42 | 7.68 | 0.77 | 100 | 6.16 | 6.49 | 6.21 | 6.31 | 4.24 | 7.42 | 5.73 | 4.83 | 5.75 | 5.90 | 0.93 | 78 | 1.44E−02 | 1.78 | 3.4 |
| 1519 | 1519_st1 | | | | | | | | | | | | | | | | | | | | | |
| hsa-miR- | hsa-miR- | 7.15 | 7.34 | 7.25 | 7.25 | 0.09 | 100 | 7.18 | 6.53 | 4.21 | 5.98 | 6.52 | 4.70 | 4.86 | 4.35 | 5.09 | 5.49 | 1.08 | 44 | 2.15E−02 | 1.76 | 3.4 |
| 101 | 101_st1 | | | | | | | | | | | | | | | | | | | | | |
| hsa-miR- | hsa-miR-369- | 5.65 | 5.04 | 4.91 | 5.20 | 0.40 | 33 | 3.56 | 2.71 | 4.47 | 4.36 | 4.36 | 2.53 | 2.92 | 2.62 | 3.53 | 3.45 | 0.80 | 0 | 5.06E−03 | 1.75 | 3.4 |
| 369-5p | 5p_st2 | | | | | | | | | | | | | | | | | | | | | |
| hsa-miR- | hsa-miR- | 6.30 | 6.84 | 6.56 | 6.57 | 0.27 | 100 | 4.55 | 5.43 | 5.92 | 5.53 | 5.77 | 5.68 | 3.50 | 4.28 | 2.74 | 4.82 | 1.13 | 22 | 2.76E−02 | 1.74 | 3.4 |
| 432 | 432_st2 | | | | | | | | | | | | | | | | | | | | | |
| hsa-asg- | hsa-asg- | 7.13 | 7.35 | 7.18 | 7.22 | 0.12 | 100 | 6.06 | 5.72 | 5.28 | 6.77 | 6.26 | 5.43 | 5.46 | 4.21 | 4.16 | 5.48 | 0.87 | 44 | 7.57E−03 | 1.74 | 3.3 |
| 14176 | 14176_st1 | | | | | | | | | | | | | | | | | | | | | |
| hsa-asg- | hsa-asg- | 5.43 | 6.34 | 5.88 | 5.88 | 0.45 | 33 | 4.31 | 4.93 | 2.76 | 4.46 | 4.30 | 4.97 | 4.14 | 3.59 | 3.92 | 4.15 | 0.68 | 0 | 2.38E−03 | 1.73 | 3.3 |
| 4069 | 4069_st1 | | | | | | | | | | | | | | | | | | | | | |
| hsa-miR-92b | hsa-miR-92b_st1 | 11.0 | 11.3 | 10.9 | 11.0 | 0.19 | 100 | 10.9 | 8.50 | 10.1 | 10.2 | 9.25 | 7.88 | 9.75 | 9.23 | 8.88 | 9.42 | 0.94 | 100 | 1.41E−02 | 1.67 | 3.2 |
| hsa-miR- | hsa- | 10.5 | 10.9 | 10.2 | 10.6 | 0.36 | 100 | 10.4 | 7.98 | 9.74 | 9.88 | 8.96 | 7.34 | 9.32 | 9.06 | 8.54 | 9.03 | 0.97 | 100 | 2.31E−02 | 1.58 | 3.0 |
| 92b | miR30_st1 | | | | | | | | | | | | | | | | | | | | | |
| hsa-asg- | hsa-asg- | 6.21 | 6.04 | 7.06 | 6.43 | 0.54 | 100 | 6.30 | 5.78 | 4.26 | 4.26 | 5.12 | 5.09 | 4.54 | 4.25 | 3.32 | 4.77 | 0.90 | 22 | 1.44E−02 | 1.66 | 3.2 |
| 8902 | 8902_st2 | | | | | | | | | | | | | | | | | | | | | |
| hsa-asg- | hsa-asg- | 5.65 | 5.59 | 5.04 | 5.43 | 0.34 | 67 | 4.49 | 3.74 | 3.91 | 3.73 | 3.81 | 3.69 | 4.20 | 3.83 | 2.92 | 3.81 | 0.42 | 0 | 1.47E−04 | 1.61 | 3.1 |
| 1301 | 1301_st1 | | | | | | | | | | | | | | | | | | | | | |
| hsa-miR- | hsa-miR- | 8.10 | 8.39 | 8.22 | 8.24 | 0.15 | 100 | 6.89 | 7.22 | 7.37 | 6.61 | 6.11 | 6.50 | 6.41 | 6.62 | 6.01 | 6.64 | 0.46 | 78 | 1.83E−04 | 1.60 | 3.0 |
| 503 | 503_st1 | | | | | | | | | | | | | | | | | | | | | |
| hsa-miR- | hsa- | 7.83 | 8.47 | 8.30 | 8.20 | 0.33 | 100 | 7.11 | 7.33 | 7.30 | 6.52 | 6.57 | 6.68 | 6.86 | 6.89 | 6.76 | 6.89 | 0.30 | 100 | 7.52E−05 | 1.31 | 2.5 |
| 503 | miR141_st1 | | | | | | | | | | | | | | | | | | | | | |
| hsa-asg- | hsa-asg- | 11.4 | 11.8 | 11.6 | 11.6 | 0.19 | 100 | 10.7 | 9.86 | 10.9 | 10.8 | 10.0 | 9.60 | 10.2 | 9.08 | 9.16 | 10.0 | 0.70 | 100 | 3.46E−03 | 1.60 | 3.0 |
| 562 | 562_st1 | | | | | | | | | | | | | | | | | | | | | |
| hsa-asg- | hsa-asg- | 5.94 | 6.55 | 5.91 | 6.13 | 0.36 | 67 | 3.76 | 6.13 | 3.85 | 3.73 | 4.39 | 5.66 | 4.07 | 3.95 | 5.37 | 4.55 | 0.92 | 0 | 1.78E−02 | 1.59 | 3.0 |
| 48081 | 4808_st1 | | | | | | | | | | | | | | | | | | | | | |
| hsa-miR- | hsa-miR- | 6.49 | 7.01 | 7.33 | 6.94 | 0.43 | 100 | 6.08 | 5.79 | 4.93 | 7.23 | 6.18 | 4.55 | 4.94 | 3.54 | 4.95 | 5.36 | 1.08 | 44 | 3.67E−02 | 1.59 | 3.0 |
| 189 | 189_st1 | | | | | | | | | | | | | | | | | | | | | |
| hsa-asg- | hsa-asg- | 7.94 | 7.95 | 8.19 | 8.02 | 0.14 | 100 | 7.43 | 6.36 | 6.67 | 7.04 | 6.26 | 6.27 | 6.63 | 6.55 | 5.09 | 6.48 | 0.64 | 89 | 2.52E−03 | 1.55 | 2.9 |
| 9696 | 9696_st1 | | | | | | | | | | | | | | | | | | | | | |
| hsa-asg- | hsa-asg- | 8.63 | 8.87 | 9.47 | 8.99 | 0.43 | 100 | 7.95 | 8.62 | 5.85 | 7.75 | 8.67 | 8.30 | 6.83 | 7.02 | 6.03 | 7.45 | 1.06 | 78 | 3.83E−02 | 1.54 | 2.9 |
| 12356 | 12356_st1 | | | | | | | | | | | | | | | | | | | | | |
| hsa-miR-365 | hsa-miR-365_st1 | 7.11 | 8.10 | 7.41 | 7.54 | 0.51 | 100 | 7.27 | 5.64 | 5.53 | 7.63 | 6.38 | 5.40 | 6.66 | 4.78 | 4.78 | 6.01 | 1.03 | 56 | 3.66E−02 | 1.53 | 2.9 |
| hsa-miR- | hsa-asg- | 7.18 | 7.82 | 7.33 | 7.44 | 0.34 | 100 | 7.33 | 5.87 | 6.09 | 7.37 | 6.38 | 5.46 | 6.63 | 4.78 | 4.67 | 6.06 | 0.98 | 56 | 4.27E−02 | 1.38 | 2.6 |
| 365 | 13156_st1 | | | | | | | | | | | | | | | | | | | | | |
| hsa-asg-3672 | hsa-asg-3672_st1 | 6.50 | 6.89 | 6.71 | 6.70 | 0.20 | 100 | 5.35 | 6.54 | 4.17 | 5.37 | 5.75 | 6.05 | 4.59 | 4.49 | 4.50 | 5.20 | 0.81 | 11 | 1.17E−02 | 1.50 | 2.8 |
| hsa-miR- | hsa-miR- | 6.64 | 7.61 | 7.39 | 7.21 | 0.50 | 100 | 5.80 | 6.16 | 5.53 | 5.92 | 5.78 | 3.48 | 5.82 | 5.72 | 7.23 | 5.72 | 0.97 | 89 | 3.14E−02 | 1.50 | 2.8 |
| 424 | 424_st1 | | | | | | | | | | | | | | | | | | | | | |
| hsa-miR- | hsa-miR- | 6.97 | 6.50 | 6.70 | 6.72 | 0.24 | 100 | 5.83 | 4.16 | 5.80 | 6.00 | 5.70 | 4.75 | 5.09 | 5.32 | 4.60 | 5.25 | 0.64 | 33 | 3.61E−03 | 1.47 | 2.8 |
| 455 | 455_st1 | | | | | | | | | | | | | | | | | | | | | |
| hsa-asg- | hsa-asg- | 5.50 | 5.48 | 5.34 | 5.44 | 0.09 | 33 | 4.49 | 3.42 | 4.87 | 4.95 | 4.11 | 4.18 | 3.59 | 2.08 | 4.07 | 3.97 | 0.88 | 0 | 1.88E−02 | 1.47 | 2.8 |
| 13166 | 13166_st2 | | | | | | | | | | | | | | | | | | | | | |
| hsa-asg- | hsa-asg- | 6.86 | 6.98 | 5.04 | 6.29 | 1.09 | 67 | 5.03 | 5.37 | 4.81 | 4.12 | 5.22 | 4.77 | 5.86 | 3.99 | 4.54 | 4.86 | 0.60 | 11 | 1.37E−02 | 1.44 | 2.7 |
| 2213_st2 | 2213_st2 | | | | | | | | | | | | | | | | | | | | | |
| hsa-asg-9512 | hsa-asg-9512_st1 | 7.01 | 7.67 | 8.37 | 7.68 | 0.68 | 100 | 6.42 | 6.94 | 4.61 | 6.58 | 7.81 | 7.05 | 6.37 | 5.29 | 5.23 | 6.25 | 1.02 | 11 | 5.00E−02 | 1.43 | 2.7 |
| hsa-asg- | hsa-asg- | 5.85 | 6.35 | 6.40 | 6.20 | 0.31 | 100 | 5.18 | 5.62 | 4.34 | 5.21 | 5.43 | 5.05 | 3.50 | 4.44 | 4.20 | 4.78 | 0.69 | 0 | 7.21E−03 | 1.43 | 2.7 |
| 3009 | 3009_st1 | | | | | | | | | | | | | | | | | | | | | |
| hsa-miR- | hsa-miR- | 5.79 | 6.77 | 5.82 | 6.13 | 0.55 | 67 | 5.83 | 4.99 | 5.24 | 5.71 | 4.89 | 4.46 | 4.49 | 3.99 | 2.74 | 4.71 | 0.94 | 11 | 3.59E−02 | 1.42 | 2.7 |
| 340 | 340_st1 | | | | | | | | | | | | | | | | | | | | | |
| hsa-miR- | hsa-miR- | 10.4 | 10.6 | 10.6 | 10.5 | 0.15 | 100 | 10.0 | 8.79 | 9.44 | 10.0 | 9.63 | 8.27 | 9.09 | 8.14 | 9.14 | 9.18 | 0.70 | 100 | 7.08E−03 | 1.41 | 2.7 |
| 148b | 148b_st2 | | | | | | | | | | | | | | | | | | | | | |
| hsa-asg-7215 | hsa-asg-7215_st2 | 6.74 | 6.67 | 6.85 | 6.75 | 0.09 | 100 | 5.32 | 6.14 | 4.81 | 5.78 | 5.15 | 5.76 | 4.73 | 5.42 | 5.00 | 5.35 | 0.48 | 11 | 6.10E−04 | 1.41 | 2.7 |
| hsa-miR-379 | hsa-miR-379_st1 | 7.81 | 8.24 | 7.79 | 7.95 | 0.25 | 100 | 6.52 | 6.42 | 7.11 | 6.97 | 7.04 | 6.59 | 6.35 | 6.14 | 6.23 | 6.60 | 0.36 | 100 | 1.47E−04 | 1.35 | 2.5 |
| hsa-asg- | hsa-asg- | 5.26 | 4.03 | 4.81 | 4.70 | 0.62 | 33 | 4.09 | 3.64 | 4.02 | 3.73 | 2.37 | 3.37 | 1.97 | 3.32 | 3.77 | 3.36 | 0.73 | 0 | 1.78E−02 | 1.34 | 2.5 |
| 3163 | 3163_st2 | | | | | | | | | | | | | | | | | | | | | |
| hsa-asg- | hsa-asg- | 6.13 | 6.37 | 6.02 | 6.17 | 0.18 | 100 | 4.81 | 4.95 | 5.89 | 5.45 | 4.97 | 4.07 | 5.09 | 4.21 | 4.32 | 4.86 | 0.59 | 0 | 4.42E−03 | 1.31 | 2.5 |
| 4460 | 4460_st2 | | | | | | | | | | | | | | | | | | | | | |
| hsa-asg- | hsa-asg- | 6.89 | 7.25 | 6.87 | 7.01 | 0.21 | 100 | 5.35 | 6.10 | 5.37 | 5.51 | 6.21 | 5.13 | 6.14 | 6.23 | 5.39 | 5.72 | 0.45 | 56 | 8.18E−04 | 1.29 | 2.4 |
| 11900 | 11900_st1 | | | | | | | | | | | | | | | | | | | | | |
| hsa-asg- | hsa-asg- | 7.24 | 7.66 | 7.76 | 7.55 | 0.27 | 100 | 6.12 | 5.82 | 7.48 | 6.09 | 6.14 | 5.70 | 6.04 | 6.93 | 6.42 | 6.30 | 0.57 | 100 | 4.82E−03 | 1.25 | 2.4 |
| 14237 | 14237_st2 | | | | | | | | | | | | | | | | | | | | | |
| hsa-asg- | hsa-asg- | 5.36 | 6.06 | 7.45 | 6.29 | 1.07 | 100 | 5.32 | 4.66 | 5.80 | 4.81 | 4.97 | 5.17 | 5.05 | 4.73 | 4.84 | 5.04 | 0.36 | 33 | 8.51E−03 | 1.25 | 2.4 |
| 4122 | 4122_st2 | | | | | | | | | | | | | | | | | | | | | |
| hsa- | hsa- | 5.33 | 6.26 | 5.96 | 5.85 | 0.48 | 100 | 3.93 | 5.15 | 3.91 | 4.49 | 5.76 | 5.27 | 4.86 | 3.83 | 4.32 | 4.61 | 0.69 | 33 | 1.74E−02 | 1.23 | 2.4 |
| cand443 | cand443_st2 | | | | | | | | | | | | | | | | | | | | | |
| hsa-asg- | hsa-asg- | 7.46 | 7.66 | 7.49 | 7.54 | 0.11 | 100 | 6.65 | 7.38 | 5.43 | 6.54 | 6.82 | 6.95 | 5.54 | 5.83 | 5.71 | 6.32 | 0.70 | 56 | 1.57E−02 | 1.22 | 2.3 |
| 3728 | 3728_st1 | | | | | | | | | | | | | | | | | | | | | |
| hsa-asg- | hsa-asg- | 6.51 | 6.75 | 6.62 | 6.63 | 0.12 | 100 | 5.68 | 4.81 | 5.71 | 5.77 | 5.54 | 5.01 | 5.12 | 5.29 | 5.78 | 5.41 | 0.36 | 22 | 2.47E−04 | 1.22 | 2.3 |
| 3798 | 3798_st1 | | | | | | | | | | | | | | | | | | | | | |
| hsa-asg-1536 | hsa-asg-1536_st2 | 6.20 | 6.15 | 5.04 | 5.79 | 0.66 | 67 | 5.45 | 4.66 | 5.77 | 5.17 | 4.47 | 3.43 | 3.85 | 3.99 | 4.54 | 4.59 | 0.77 | 11 | 3.70E−02 | 1.20 | 2.3 |
| hsa-asg-67 | hsa-asg- | 4.68 | 5.34 | 4.16 | 4.73 | 0.59 | 33 | 4.55 | 3.29 | 4.02 | 2.33 | 3.22 | 3.59 | 3.68 | 3.54 | 3.65 | 3.54 | 0.60 | 0 | 1.43E−02 | 1.19 | 2.3 |
| | 67_st2 | | | | | | | | | | | | | | | | | | | | | |
| hsa-asg- | hsa-asg- | 4.73 | 6.11 | 6.02 | 5.62 | 0.77 | 67 | 4.02 | 4.23 | 4.02 | 4.86 | 4.60 | 4.89 | 4.20 | 4.52 | 4.67 | 4.45 | 0.34 | 0 | 3.30E−03 | 1.18 | 2.3 |
| 12874 | 12874_st1 | | | | | | | | | | | | | | | | | | | | | |
| hsa-miR- | hsa-miR- | 8.34 | 9.13 | 8.44 | 8.64 | 0.43 | 100 | 8.38 | 8.32 | 7.31 | 8.03 | 8.04 | 6.51 | 6.91 | 6.53 | 7.20 | 7.47 | 0.74 | 100 | 2.98E−02 | 1.17 | 2.2 |
| 19b | 19b_st2 | | | | | | | | | | | | | | | | | | | | | |
| hsa-miR- | hsa-miR- | 11.9 | 12.2 | 12.1 | 12.1 | 0.16 | 100 | 11.6 | 11.2 | 11.1 | 11.5 | 11.1 | 10.9 | 10.9 | 10.0 | 9.96 | 10.9 | 0.58 | 100 | 7.69E−03 | 1.16 | 2.2 |
| 30b | 30b_st2 | | | | | | | | | | | | | | | | | | | | | |
| hsa-miR-30e-5p | hsa-miR-30e-5p_st2 | 10.6 | 11.1 | 10.4 | 10.7 | 0.36 | 100 | 10.4 | 9.64 | 9.71 | 10.5 | 9.81 | 9.23 | 9.23 | 8.15 | 9.50 | 9.58 | 0.70 | 100 | 2.27E−02 | 1.16 | 2.2 |
| hsa-asg- | hsa-asg- | 5.94 | 5.51 | 5.34 | 5.60 | 0.31 | 67 | 5.29 | 4.16 | 4.54 | 5.12 | 4.04 | 4.31 | 4.20 | 3.91 | 4.60 | 4.46 | 0.47 | 11 | 3.47E−03 | 1.13 | 2.2 |
| 11867 | 11867_st1 | | | | | | | | | | | | | | | | | | | | | |
| hsa-asg- | hsa-asg- | 4.68 | 4.87 | 6.02 | 5.19 | 0.73 | 33 | 3.85 | 4.95 | 3.67 | 4.26 | 4.87 | 3.48 | 3.59 | 4.21 | 3.65 | 4.06 | 0.55 | 0 | 1.67E−02 | 1.13 | 2.2 |
| 3742 | 3742_st1 | | | | | | | | | | | | | | | | | | | | | |
| hsa-asg- | hsa-asg- | 5.79 | 6.43 | 6.58 | 6.27 | 0.42 | 67 | 5.32 | 6.01 | 4.72 | 5.53 | 4.45 | 5.76 | 4.90 | 4.71 | 4.92 | 5.15 | 0.53 | 0 | 8.36E−03 | 1.12 | 2.2 |
| 13047_st2 | 13047_st2 | | | | | | | | | | | | | | | | | | | | | |
| hsa-asg- | hsa-asg- | 5.92 | 4.24 | 4.49 | 4.88 | 0.91 | 33 | 3.21 | 4.49 | 4.30 | 3.01 | 3.44 | 4.18 | 4.14 | 3.44 | 3.77 | 3.77 | 0.53 | 0 | 2.33E−02 | 1.11 | 2.2 |
| 4513_st2 | 4513_st2 | | | | | | | | | | | | | | | | | | | | | |
| hsa-miR- | hsa-miR- | 7.79 | 8.22 | 7.40 | 7.80 | 0.41 | 100 | 6.40 | 7.30 | 7.22 | 6.96 | 6.63 | 7.66 | 5.73 | 5.86 | 6.60 | 6.71 | 0.65 | 100 | 2.21E−02 | 1.10 | 2.1 |
| 494 | 494_st1 | | | | | | | | | | | | | | | | | | | | | |
| hsa-miR- | hsa- | 7.11 | 7.72 | 7.23 | 7.35 | 0.32 | 100 | 6.83 | 6.55 | 6.85 | 6.43 | 6.38 | 7.10 | 5.40 | 5.79 | 6.89 | 6.47 | 0.55 | 89 | 2.78E−02 | 0.89 | 1.8 |
| 494 | miR61_st2 | | | | | | | | | | | | | | | | | | | | | |
| hsa-asg- | hsa-asg- | 7.35 | 7.28 | 6.52 | 7.05 | 0.46 | 100 | 5.89 | 5.96 | 6.99 | 6.57 | 5.61 | 5.05 | 5.05 | 6.49 | 6.00 | 5.96 | 0.66 | 78 | 2.58E−02 | 1.09 | 2.1 |
| 12807_st2 | 12807_st2 | | | | | | | | | | | | | | | | | | | | | |
| hsa-asg- | hsa-asg- | 4.37 | 5.87 | 4.43 | 4.89 | 0.85 | 33 | 3.93 | 3.29 | 4.21 | 4.12 | 4.50 | 2.99 | 3.85 | 3.91 | 3.39 | 3.80 | 0.48 | 0 | 1.76E−02 | 1.09 | 2.1 |
| 13293_st1 | 13293_st1 | | | | | | | | | | | | | | | | | | | | | |
| hsa-asg- | hsa-asg- | 6.36 | 6.79 | 6.42 | 6.53 | 0.23 | 100 | 6.52 | 4.30 | 6.11 | 5.93 | 5.24 | 4.37 | 5.86 | 5.62 | 5.00 | 5.44 | 0.77 | 33 | 4.14E−02 | 1.09 | 2.1 |
| 9719_st1 | 9719_st1 | | | | | | | | | | | | | | | | | | | | | |
| hsa-miR- | hsa-miR- | 6.90 | 6.81 | 6.33 | 6.68 | 0.31 | 100 | 6.18 | 5.61 | 6.71 | 6.01 | 5.09 | 4.68 | 5.71 | 4.87 | 5.60 | 5.61 | 0.65 | 44 | 2.26E−02 | 1.07 | 2.1 |
| 18b | 18b_st1 | | | | | | | | | | | | | | | | | | | | | |
| hsa-miR- | hsa-miR- | 12.0 | 12.3 | 12.4 | 12.2 | 0.25 | 100 | 11.6 | 11.6 | 11.2 | 11.9 | 11.5 | 11.6 | 11.1 | 10.1 | 10.02 | 11.2 | 0.68 | 100 | 2.60E−02 | 1.07 | 2.1 |
| 30c | 30c_st1 | | | | | | | | | | | | | | | | | | | | | |
| hsa-asg- | hsa-asg- | 6.88 | 6.80 | 6.60 | 6.76 | 0.14 | 100 | 6.12 | 5.40 | 5.92 | 6.19 | 5.89 | 5.72 | 5.40 | 5.45 | 5.35 | 5.72 | 0.33 | 33 | 4.07E−04 | 1.05 | 2.1 |
| 2500_st1 | 2500_st1 | | | | | | | | | | | | | | | | | | | | | |
| hsa-asg- | hsa-asg- | 5.23 | 5.28 | 5.12 | 5.21 | 0.08 | 67 | 5.25 | 4.49 | 3.79 | 4.55 | 4.53 | 4.18 | 3.05 | 3.83 | 3.87 | 4.17 | 0.63 | 11 | 1.98E−02 | 1.04 | 2.1 |
| 7690_st1 | 7690_st1 | | | | | | | | | | | | | | | | | | | | | |
| hsa-asg- | hsa-asg- | 6.57 | 7.15 | 6.76 | 6.83 | 0.29 | 100 | 6.86 | 5.43 | 4.75 | 6.62 | 5.93 | 5.73 | 5.71 | 5.77 | 5.35 | 5.79 | 0.64 | 78 | 2.49E−02 | 1.03 | 2.0 |
| 5053_st1 | 5053_st1 | | | | | | | | | | | | | | | | | | | | | |
| hsa-miR- | hsa-miR- | 10.4 | 10.1 | 10.5 | 10.3 | 0.17 | 100 | 10.7 | 9.36 | 9.71 | 9.95 | 8.86 | 8.99 | 9.01 | 8.77 | 8.68 | 9.35 | 0.69 | 100 | 3.19E−02 | 1.03 | 2.0 |
| 128a | 128a_st2 | | | | | | | | | | | | | | | | | | | | | |
| hsa-asg- | hsa-asg- | 4.40 | 5.88 | 4.46 | 4.91 | 0.84 | 33 | 3.07 | 3.92 | 3.91 | 5.02 | 2.97 | 4.24 | 3.77 | 4.31 | 3.77 | 3.89 | 0.62 | 0 | 4.50E−02 | 1.03 | 2.0 |
| 942_st2 | 942_st2 | | | | | | | | | | | | | | | | | | | | | |
| hsa-asg- | hsa-asg- | 6.00 | 6.31 | 5.80 | 6.03 | 0.26 | 67 | 5.18 | 5.04 | 4.61 | 5.21 | 5.15 | 5.35 | 4.73 | 4.68 | 5.14 | 5.01 | 0.27 | 0 | 1.73E−04 | 1.02 | 2.0 |
| 4515_st1 | 4515_st1 | | | | | | | | | | | | | | | | | | | | | |
| hsa-asg- | hsa-asg- | 5.70 | 5.04 | 5.23 | 5.33 | 0.34 | 33 | 4.61 | 4.23 | 5.09 | 4.46 | 3.63 | 4.40 | 4.20 | 3.54 | 4.60 | 4.31 | 0.48 | 0 | 7.69E−03 | 1.02 | 2.0 |
| 6883_st1 | 6883_st1 | | | | | | | | | | | | | | | | | | | | | |
| hsa-asg-10913_st1 | hsa-asg-10913_st1 | 7.25 | 7.19 | 7.23 | 7.22 | 0.03 | 100 | 6.71 | 5.79 | 6.77 | 6.85 | 5.79 | 6.20 | 5.92 | 5.69 | 6.18 | 6.21 | 0.46 | 67 | 4.11E−03 | 1.01 | 2.0 |
| hsa-miR-92 | hsa-cand342_st1 | 13.47 | 13.62 | 13.38 | 13.49 | 0.12 | 100 | 13.58 | 11.97 | 13.12 | 12.92 | 12.28 | 11.24 | 12.71 | 12.42 | 12.14 | 12.49 | 0.69 | 100 | 3.52E−02 | 1.01 | 2.0 |
| hsa-miR-92 | hsa-miR-92_st1 | 13.3 | 13.5 | 13.3 | 13.4 | 0.14 | 100 | 13.5 | 12.0 | 13.0 | 12.9 | 12.2 | 11.1 | 12.7 | 12.4 | 12.14 | 12.4 | 0.68 | 100 | 3.97E−02 | 0.96 | 2.0 |
| hsa-asg-12421 | hsa-asg-12421_st1 | 8.47 | 7.99 | 8.56 | 8.34 | 0.30 | 100 | 8.10 | 7.93 | 6.72 | 7.33 | 7.72 | 7.49 | 6.61 | 7.79 | 6.39 | 7.34 | 0.62 | 44 | 2.60E−02 | 1.00 | 2.0 |

SD, standard deviation;
%, percentage of samples expressing miRNA above background levels;
Log2Diff, difference in VSN-transformed expression between LIV and LNneg samples.

### Example 23

### miRNAs Differentally Expressed Between Normal Ovary Tissue and Normal Lymph Nodes

[0307] To identify miRNAs that may be useful markers for metastasis of cancerous ovary cells to lymph nodes, the inventors identified miRNAs that are expressed at significantly higher levels in normal ovary tissue than in cancer-negative lymph nodes.

[0308] Total RNA, purified from three separate normal human ovary tissue samples (FirstChoice® Human Ovary Total RNA, cat. no. AM6974; Ambion, Austin, Tex., USA) and from nine normal human lymph node samples (FirstChoice® Human Lymph Node Total RNA, cat. no. AM7894; Ambion, Austin, Tex., USA) was purchased from Ambion. miRNA purification and labeling and microarray expression analyses were performed as described above in Example 2.

[0309] The inventors identified 239 miRNAs (114 verified, 125 predicted) with significant differential expression between normal ovary tissue samples and normal lymph nodes (|log 2Diff| ovary vs LN neg≧1 and p-value<0.05) (Table 22). Among the verified miRNAs, hsa-miR-383 had an average expression level over 100-fold higher in ovary samples; hsa-miR-513, -509, and, -493-5p had average expression levels that were more than 50-fold higher in ovary samples; 15 miRNAs had average expression levels that were between 20- and 50-fold higher in ovary samples; 18 miRNAs had average expression levels that were between 10- and 20-fold higher in ovary samples; and 28 miRNAs had average expression levels that were between 5- and 10-fold higher in ovary tissue samples than in normal lymph nodes. Among the predicted miRNAs, hsa-asg-5638_st2 had an average expression level over 100-fold higher in ovary samples; hsa-asg-13404_st2 had an average expression level over 50-fold higher in ovary samples; nine miRNAs had average expression levels that were between 20- and 50-fold higher in ovary samples; 10 miRNAs had average expression levels that were between 10- and 20-fold higher in ovary samples; and 23 miRNAs had average expression levels that were between 5- and 10-fold higher in ovary tissue samples than in normal lymph nodes.

TABLE 22
MicroRNAs Differentially Expressed Between Normal Ovary Samples (OVR) and Cancer-Negative Lymph Node Samples (LNneg) from Patients.

| | | OVR | | | | | | LNneg | | | | | | | | | | | | | | |
|---|---|---|---|---|---|---|---|---|---|---|---|---|---|---|---|---|---|---|---|---|---|---|
| MicroRNA | Probe ID | 1 | 2 | 3 | M | SD | % | 1 | 2 | 3 | 4 | 5 | 6 | 7 | 8 | 9 | M | SD | % | ttest | log2Diff | Fold |
| hsa-miR-383 | hsa-miR-383_st1 | 9.65 | 9.63 | 8.99 | 9.42 | 0.38 | 100 | 3.33 | 2.87 | 2.43 | 2.60 | 3.22 | 1.29 | 2.64 | 2.62 | 1.38 | 2.49 | 0.72 | 0 | 2.28E−08 | −6.94 | 122 |
| hsa-asg- | hsa-asg- | 10.8 | 8.98 | 8.29 | 9.36 | 1.30 | 100 | 4.02 | 2.54 | 2.18 | 2.60 | 1.64 | 2.61 | 1.25 | 2.78 | 3.25 | 2.54 | 0.82 | 0 | 6.87E−07 | −6.81 | 112 |
| 5638 | 5638_st2 | | | | | | | | | | | | | | | | | | | | | |
| hsa-miR-513 | hsa-miR-513_st1 | 11.9 | 10.8 | 10.2 | 10.99 | 0.85 | 100 | 6.18 | 6.94 | 4.98 | 5.45 | 4.04 | 5.92 | 0.48 | 5.15 | 5.53 | 4.96 | 1.87 | 33 | 3.55E−04 | −6.03 | 65.3 |
| hsa-asg- | hsa-asg- | 9.22 | 8.24 | 8.93 | 8.80 | 0.50 | 100 | 4.17 | 2.71 | 5.28 | 2.93 | 3.28 | 1.58 | 2.15 | 1.11 | 2.33 | 2.84 | 1.29 | 0 | 1.81E−05 | −5.96 | 62.3 |
| 13404 | 13404_st2 | | | | | | | | | | | | | | | | | | | | | |
| hsa-miR- | hsa-miR- | 12.9 | 11.6 | 10.9 | 11.88 | 1.00 | 100 | 7.11 | 6.72 | 5.57 | 5.80 | 5.79 | 6.77 | 5.29 | 5.29 | 5.42 | 5.97 | 0.70 | 56 | 4.50E−07 | −5.90 | 59.9 |
| 509 | 509_st2 | | | | | | | | | | | | | | | | | | | | | |
| hsa-miR- | hsa-miR- | 10.2 | 10.5 | 10.6 | 10.45 | 0.22 | 100 | 4.37 | 3.83 | 6.88 | 6.18 | 6.33 | 3.69 | 4.38 | 1.88 | 4.60 | 4.68 | 1.56 | 33 | 1.05E−04 | −5.77 | 54.5 |
| 493-5p | 493-5p_st1 | | | | | | | | | | | | | | | | | | | | | |
| hsa-miR-495 | hsa-miR-495_st1 | 10.6 | 10.9 | 10.7 | 10.78 | 0.16 | 100 | 6.02 | 4.81 | 6.97 | 6.26 | 6.32 | 4.43 | 5.16 | 2.45 | 4.89 | 5.26 | 1.35 | 56 | 4.38E−05 | −5.53 | 46.1 |
| hsa-miR202 | hsa-miR202_st2 | 9.36 | 8.48 | 8.97 | 8.94 | 0.44 | 100 | 3.85 | 2.71 | 4.93 | 3.95 | 3.63 | 2.44 | 4.27 | 2.45 | 3.09 | 3.48 | 0.87 | 0 | 1.27E−06 | −5.45 | 43.9 |
| hsa-miR- | hsa-asg- | 6.81 | 7.08 | 6.49 | 6.79 | 0.30 | 67 | 0.55 | 0.54 | 2.76 | 1.51 | 1.37 | 0.60 | 1.97 | 1.58 | 1.74 | 1.40 | 0.74 | 0 | 3.14E−07 | −5.39 | 42.0 |
| 493-3p | 8480_st1 | | | | | | | | | | | | | | | | | | | | | |
| hsa-miR- | hsa-miR- | 7.45 | 7.63 | 7.00 | 7.36 | 0.32 | 100 | 4.66 | 3.10 | 4.07 | 3.01 | 2.28 | 1.88 | 4.33 | 3.49 | 4.11 | 3.43 | 0.95 | 0 | 4.55E−05 | −3.92 | 15.2 |
| 493-3p | 493-3p_st1 | | | | | | | | | | | | | | | | | | | | | |
| hsa-asg- | hsa-asg- | 10.1 | 10.1 | 9.68 | 10.00 | 0.28 | 100 | 5.18 | 4.43 | 6.99 | 6.06 | 5.91 | 3.54 | 4.59 | 3.07 | 2.10 | 4.65 | 1.57 | 22 | 1.99E−04 | −5.34 | 40.6 |
| 5021_st1 | 5021_st1 | | | | | | | | | | | | | | | | | | | | | |
| hsa-miR- | hsa-miR- | 8.36 | 9.84 | 9.02 | 9.07 | 0.74 | 100 | 4.85 | 3.74 | 4.54 | 5.23 | 5.56 | 2.99 | 3.40 | 2.27 | 2.10 | 3.85 | 1.27 | 11 | 5.83E−05 | −5.22 | 37.3 |
| 411 | 411_st1 | | | | | | | | | | | | | | | | | | | | | |
| hsa-miR- | hsa-miR- | 9.54 | 10.4 | 9.77 | 9.93 | 0.50 | 100 | 5.73 | 4.49 | 5.80 | 6.38 | 5.99 | 2.99 | 5.05 | 2.45 | 3.97 | 4.76 | 1.39 | 44 | 1.08E−04 | −5.17 | 36.0 |
| 299-5p | 299-5p_st2 | | | | | | | | | | | | | | | | | | | | | |
| hsa-miR- | hsa-miR- | 8.32 | 8.45 | 7.94 | 8.24 | 0.27 | 100 | 2.78 | 2.36 | 4.21 | 3.40 | 4.21 | 2.99 | 3.50 | 1.29 | 3.25 | 3.11 | 0.91 | 0 | 3.05E−06 | −5.13 | 34.9 |
| 381 | 381_st2 | | | | | | | | | | | | | | | | | | | | | |
| hsa-miR-127 | hsa-miR-127_st1 | 11.7 | 11.7 | 11.5 | 11.66 | 0.12 | 100 | 6.81 | 5.57 | 7.95 | 7.53 | 7.69 | 5.72 | 6.59 | 5.49 | 5.44 | 6.53 | 1.02 | 56 | 7.52E−06 | −5.12 | 34.8 |
| hsa-asg- | hsa-asg- | 10.0 | 10.0 | 9.71 | 9.96 | 0.22 | 100 | 5.60 | 5.37 | 6.65 | 5.89 | 5.90 | 4.03 | 4.73 | 2.45 | 3.39 | 4.89 | 1.36 | 56 | 9.87E−05 | −5.07 | 33.5 |
| 13254 | 13254_st1 | | | | | | | | | | | | | | | | | | | | | |
| hsa-asg- | hsa-asg- | 9.20 | 7.74 | 7.61 | 8.18 | 0.88 | 100 | 4.24 | 3.92 | 2.66 | 2.77 | 2.76 | 4.37 | 1.08 | 2.93 | 4.24 | 3.22 | 1.08 | 0 | 3.14E−05 | −4.96 | 31.2 |
| 5630 | 5630_st2 | | | | | | | | | | | | | | | | | | | | | |
| hsa-asg-9696 | hsa-asg-9696_st1 | 11.3 | 11.4 | 11.5 | 11.44 | 0.11 | 100 | 7.43 | 6.36 | 6.67 | 7.04 | 6.26 | 6.27 | 6.63 | 6.55 | 5.09 | 6.48 | 0.64 | 89 | 1.51E−07 | −4.96 | 31.2 |
| hsa-miR- | hsa-miR- | 11.1 | 11.5 | 10.9 | 11.22 | 0.30 | 100 | 6.49 | 6.52 | 7.70 | 8.08 | 7.70 | 5.24 | 5.64 | 3.99 | 5.09 | 6.27 | 1.39 | 67 | 1.46E−04 | −4.95 | 30.9 |
| 368 | 368_st2 | | | | | | | | | | | | | | | | | | | | | |
| hsa-miR- | hsa-miR- | 10.5 | 10.6 | 10.3 | 10.51 | 0.16 | 100 | 6.06 | 5.84 | 6.97 | 6.90 | 6.25 | 5.40 | 4.90 | 3.74 | 4.40 | 5.61 | 1.10 | 67 | 2.20E−05 | −4.90 | 29.9 |
| 487b | 487b_st2 | | | | | | | | | | | | | | | | | | | | | |
| hsa-miR- | hsa-miR- | 9.53 | 9.61 | 10.2 | 9.80 | 0.39 | 100 | 7.39 | 1.14 | 5.89 | 7.34 | 4.58 | 4.18 | 5.80 | 4.68 | 3.77 | 4.97 | 1.94 | 0 | 1.96E−03 | −4.82 | 28.3 |
| 328 | 328_st1 | | | | | | | | | | | | | | | | | | | | | |
| hsa-miR- | hsa-miR- | 9.59 | 9.71 | 9.53 | 9.61 | 0.09 | 100 | 4.55 | 5.43 | 5.92 | 5.53 | 5.77 | 5.68 | 3.50 | 4.28 | 2.74 | 4.82 | 1.13 | 22 | 3.23E−05 | −4.79 | 27.6 |
| 432 | 432_st2 | | | | | | | | | | | | | | | | | | | | | |
| hsa-miR- | hsa-miR- | 9.97 | 10.0 | 9.58 | 9.85 | 0.24 | 100 | 5.11 | 5.78 | 5.99 | 5.85 | 5.70 | 4.21 | 4.73 | 4.31 | 5.02 | 5.19 | 0.68 | 0 | 4.79E−07 | −4.66 | 25.3 |
| 134 | 134_st2 | | | | | | | | | | | | | | | | | | | | | |
| hsa-asg-13646 | hsa-asg-13646_st1 | 11.5 | 12.0 | 11.8 | 11.80 | 0.23 | 100 | 8.24 | 8.13 | 6.97 | 7.98 | 6.55 | 7.56 | 6.68 | 6.07 | 7.12 | 7.25 | 0.77 | 100 | 1.83E−06 | −4.55 | 23.4 |
| hsa-asg- | hsa-asg- | 6.66 | 6.57 | 6.34 | 6.52 | 0.17 | 100 | 1.65 | 2.16 | 1.92 | 2.03 | 2.90 | 1.78 | 3.59 | 0.93 | 0.93 | 1.99 | 0.85 | 0 | 4.79E−06 | −4.53 | 23.2 |
| 7472 | 7472_st2 | | | | | | | | | | | | | | | | | | | | | |
| hsa-asg-13258 | hsa-asg-13258_st2 | 12.1 | 12.6 | 12.3 | 12.35 | 0.23 | 100 | 9.05 | 8.95 | 7.03 | 8.66 | 7.51 | 8.06 | 7.19 | 6.23 | 7.94 | 7.85 | 0.95 | 100 | 1.30E−05 | −4.50 | 22.7 |
| hsa-asg- | hsa-asg- | 7.11 | 7.73 | 7.00 | 7.28 | 0.39 | 100 | 3.76 | 3.29 | 3.91 | 3.63 | 3.44 | 2.69 | 1.42 | 1.48 | 1.62 | 2.80 | 1.03 | 0 | 3.10E−05 | −4.48 | 22.3 |
| 5617 | 5617_st1 | | | | | | | | | | | | | | | | | | | | | |
| hsa-miR- | hsa-miR- | 7.32 | 6.95 | 7.53 | 7.27 | 0.29 | 100 | 2.43 | 2.71 | 4.54 | 2.93 | 4.21 | 2.35 | 1.60 | 1.68 | 2.92 | 2.82 | 1.00 | 0 | 2.47E−05 | −4.44 | 21.8 |
| 433 | 433_st2 | | | | | | | | | | | | | | | | | | | | | |
| hsa-miR- | hsa-miR- | 10.2 | 10.8 | 10.7 | 10.59 | 0.31 | 100 | 7.18 | 5.82 | 5.98 | 8.21 | 6.76 | 5.46 | 5.19 | 5.42 | 5.78 | 6.20 | 0.99 | 44 | 2.49E−05 | −4.39 | 20.9 |
| 204 | 204_st2 | | | | | | | | | | | | | | | | | | | | | |
| hsa-miR- | hsa-miR- | 10.9 | 11.2 | 10.6 | 10.97 | 0.30 | 100 | 6.52 | 6.42 | 7.11 | 6.97 | 7.04 | 6.59 | 6.35 | 6.14 | 6.23 | 6.60 | 0.36 | 100 | 4.10E−09 | −4.37 | 20.7 |
| 379 | 379_st1 | | | | | | | | | | | | | | | | | | | | | |
| hsa-miR- | hsa-miR- | 8.52 | 9.10 | 8.55 | 8.72 | 0.33 | 100 | 5.14 | 4.08 | 5.49 | 5.67 | 4.85 | 4.03 | 2.48 | 3.83 | 3.77 | 4.37 | 1.01 | 0 | 3.23E−05 | −4.35 | 20.4 |
| 376a | 376a_st2 | | | | | | | | | | | | | | | | | | | | | |
| hsa-miR-154 | hsa-miR-154_st2 | 7.78 | 8.43 | 7.25 | 7.82 | 0.59 | 100 | 3.76 | 2.54 | 4.30 | 4.36 | 4.91 | 3.13 | 3.17 | 1.29 | 3.97 | 3.49 | 1.10 | 0 | 8.28E−05 | −4.33 | 20.1 |
| hsa-miR- | hsa-asg- | 6.60 | 7.11 | 7.56 | 7.09 | 0.48 | 100 | 3.56 | 2.16 | 2.43 | 3.01 | 2.53 | 3.13 | 2.92 | 2.93 | 2.74 | 2.82 | 0.41 | 0 | 3.56E−08 | −4.27 | 19.3 |
| 450 | 14228_st2 | | | | | | | | | | | | | | | | | | | | | |
| hsa-miR- | hsa-miR- | 7.51 | 7.93 | 8.60 | 8.01 | 0.55 | 100 | 4.24 | 2.71 | 2.86 | 3.91 | 3.63 | 4.03 | 4.20 | 4.47 | 4.07 | 3.79 | 0.61 | 0 | 9.95E−07 | −4.22 | 18.7 |
| 450 | 450_st2 | | | | | | | | | | | | | | | | | | | | | |
| hsa-miR- | hsa-miR- | 9.49 | 9.94 | 10.43 | 9.96 | 0.47 | 100 | 5.80 | 6.16 | 5.53 | 5.92 | 5.78 | 3.48 | 5.82 | 5.72 | 7.23 | 5.72 | 0.97 | 89 | 3.26E−05 | −4.24 | 18.9 |
| 424 | 424_st1 | | | | | | | | | | | | | | | | | | | | | |
| hsa-miR- | hsa-miR- | 7.63 | 7.05 | 7.35 | 7.34 | 0.29 | 100 | 3.45 | 3.29 | 3.39 | 3.68 | 3.28 | 1.97 | 3.50 | 1.88 | 3.53 | 3.11 | 0.68 | 0 | 1.30E−06 | −4.24 | 18.8 |
| 485-5p | 485-5p_st2 | | | | | | | | | | | | | | | | | | | | | |
| hsa-miR-376a | hsa-asg-10049_st1 | 8.86 | 9.49 | 8.85 | 9.07 | 0.37 | 100 | 5.03 | 4.91 | 6.09 | 5.56 | 5.35 | 4.10 | 3.85 | 4.14 | 4.67 | 4.85 | 0.74 | 11 | 3.24E−06 | −4.21 | 18.5 |
| hsa-miR- | hsa-asg- | 7.56 | 7.92 | 7.44 | 7.64 | 0.25 | 100 | 3.33 | 4.30 | 3.39 | 4.00 | 4.85 | 3.69 | 2.92 | 4.07 | 1.86 | 3.60 | 0.87 | 0 | 1.64E−05 | −4.04 | 16.4 |
| 376a | 14234_st1 | | | | | | | | | | | | | | | | | | | | | |
| hsa-asg- | hsa-asg- | 6.42 | 5.43 | 6.18 | 6.01 | 0.52 | 33 | 3.45 | 1.24 | 1.79 | 3.68 | 2.01 | 2.85 | 1.79 | 0.13 | 0.63 | 1.95 | 1.21 | 0 | 2.54E−04 | −4.06 | 16.7 |
| 2025 | 2025_st2 | | | | | | | | | | | | | | | | | | | | | |
| hsa-miR-299-3p | hsa-asg-10378_st1 | 6.79 | 7.29 | 6.38 | 6.82 | 0.45 | 100 | 3.66 | 3.42 | 3.23 | 1.93 | 2.45 | 1.97 | 1.60 | 3.20 | 3.53 | 2.78 | 0.79 | 0 | 8.84E−06 | −4.05 | 16.5 |
| hsa-miR- | hsa-miR- | 6.79 | 7.17 | 6.28 | 6.75 | 0.45 | 100 | 2.43 | 3.42 | 3.39 | 2.93 | 3.44 | 2.77 | 3.29 | 1.88 | 2.92 | 2.94 | 0.52 | 0 | 5.65E−07 | −3.80 | 14.0 |
| 299-3p | 299-3p_st2 | | | | | | | | | | | | | | | | | | | | | |
| hsa-miR- | hsa- | 7.16 | 7.36 | 7.38 | 7.30 | 0.12 | 100 | 4.31 | 2.54 | 4.12 | 3.28 | 2.45 | 3.26 | 3.59 | 2.78 | 3.09 | 3.27 | 0.65 | 0 | 1.15E−06 | −4.03 | 16.3 |
| 485-3p | miR23_st2 | | | | | | | | | | | | | | | | | | | | | |
| hsa-miR- | hsa-miR- | 7.06 | 7.40 | 7.12 | 7.20 | 0.18 | 100 | 3.66 | 3.02 | 4.30 | 4.43 | 4.27 | 3.13 | 3.68 | 3.54 | 3.87 | 3.77 | 0.50 | 0 | 5.26E−07 | −3.43 | 10.8 |
| 485-3p | 485-3p_st2 | | | | | | | | | | | | | | | | | | | | | |
| hsa-miR- | hsa-miR- | 6.13 | 6.84 | 7.99 | 6.99 | 0.94 | 100 | 4.31 | 2.54 | 2.86 | 3.15 | 1.83 | 1.78 | 3.05 | 2.62 | 4.54 | 2.96 | 0.96 | 0 | 8.55E−05 | −4.02 | 16.3 |
| 592 | 592_st1 | | | | | | | | | | | | | | | | | | | | | |
| hsa-miR- | hsa-asg- | 5.63 | 7.04 | 7.75 | 6.81 | 1.08 | 100 | 3.07 | 3.29 | 3.67 | 1.72 | 1.64 | 2.69 | 3.05 | 1.68 | 5.42 | 2.92 | 1.21 | 11 | 5.92E−04 | −3.89 | 14.8 |
| 592 | 4400_st1 | | | | | | | | | | | | | | | | | | | | | |
| hsa-miR- | hsa-miR- | 8.09 | 7.40 | 7.93 | 7.81 | 0.36 | 100 | 3.93 | 2.87 | 3.67 | 3.63 | 3.85 | 2.85 | 3.85 | 4.68 | 5.18 | 3.84 | 0.75 | 0 | 6.05E−06 | −3.97 | 15.7 |
| 542-5p | 542-5p_st2 | | | | | | | | | | | | | | | | | | | | | |
| hsa-miR- | hsa-miR- | 10.9 | 9.95 | 9.51 | 10.14 | 0.74 | 100 | 5.73 | 5.98 | 6.65 | 6.64 | 6.19 | 6.42 | 5.43 | 6.13 | 6.55 | 6.19 | 0.42 | 100 | 3.51E−07 | −3.95 | 15.4 |
| 508 | 508_st1 | | | | | | | | | | | | | | | | | | | | | |
| hsa-asg-14147 | hsa-asg-14147_st1 | 6.69 | 7.23 | 7.53 | 7.15 | 0.43 | 33 | 4.43 | 4.33 | 3.54 | 3.28 | 3.10 | 3.69 | 3.45 | 1.68 | 1.38 | 3.21 | 1.05 | 0 | 1.07E−04 | −3.94 | 15.3 |
| hsa-asg- | hsa-asg- | 6.13 | 7.45 | 7.56 | 7.05 | 0.80 | 100 | 4.17 | 3.64 | 2.86 | 2.69 | 3.54 | 2.69 | 3.40 | 2.78 | 2.33 | 3.12 | 0.59 | 0 | 3.29E−06 | −3.93 | 15.2 |
| 11443 | 11443_st1 | | | | | | | | | | | | | | | | | | | | | |
| hsa-miR- | hsa-miR-539_st1 | 6.37 | 6.72 | 6.31 | 6.47 | 0.22 | 100 | 4.66 | 3.10 | 2.66 | 3.40 | 2.69 | 2.99 | 1.97 | 2.62 | 1.38 | 2.55 | 0.64 | 0 | 1.45E−06 | −3.92 | 15.1 |
| hsa-miR- | hsa- | 5.73 | 6.10 | 4.99 | 5.60 | 0.56 | 67 | 2.05 | 3.16 | 1.39 | 2.42 | 1.83 | 1.88 | 3.50 | 1.68 | 2.10 | 2.22 | 0.63 | 0 | 9.21E−06 | −3.39 | 10.5 |
| 539 | miR177_st1 | | | | | | | | | | | | | | | | | | | | | |
| hsa-miR- | hsa-miR- | 11.0 | 9.86 | 10.7 | 10.55 | 0.62 | 100 | 6.89 | 7.22 | 7.37 | 6.61 | 6.11 | 6.50 | 6.41 | 6.62 | 6.01 | 6.64 | 0.46 | 78 | 3.32E−07 | −3.91 | 15.1 |
| 503 | 503_st1 | | | | | | | | | | | | | | | | | | | | | |
| hsa-miR- | hsa- | 11.0 | 10.0 | 10.6 | 10.59 | 0.53 | 100 | 7.11 | 7.33 | 7.30 | 6.52 | 6.57 | 6.68 | 6.86 | 6.89 | 6.76 | 6.89 | 0.30 | 100 | 2.47E−08 | −3.70 | 13.0 |
| 503 | miR141_st1 | | | | | | | | | | | | | | | | | | | | | |
| hsa-miR- | hsa-miR- | 7.25 | 7.23 | 7.33 | 7.27 | 0.06 | 100 | 3.56 | 2.71 | 4.47 | 4.36 | 4.36 | 2.53 | 2.92 | 2.62 | 3.53 | 3.45 | 0.80 | 0 | 1.14E−05 | −3.82 | 14.1 |
| 369-5p | 369-5p_st2 | | | | | | | | | | | | | | | | | | | | | |
| hsa-miR- | hsa-asg- | 6.60 | 7.41 | 6.91 | 6.97 | 0.41 | 100 | 3.76 | 3.42 | 4.02 | 2.23 | 3.72 | 3.73 | 3.40 | 2.78 | 3.53 | 3.40 | 0.56 | 0 | 1.45E−06 | −3.58 | 11.9 |
| 369-5p | 1521_st1 | | | | | | | | | | | | | | | | | | | | | |
| hsa-miR- | hsa-miR- | 6.26 | 6.08 | 7.35 | 6.56 | 0.69 | 100 | 4.61 | 3.42 | 2.86 | 3.15 | 3.63 | 2.53 | 1.60 | 1.29 | 2.54 | 2.85 | 1.02 | 0 | 1.73E−04 | −3.72 | 13.1 |
| 19a | 19a_st1 | | | | | | | | | | | | | | | | | | | | | |
| hsa-asg-13166 | hsa-asg-13166_st2 | 7.14 | 8.15 | 7.69 | 7.66 | 0.51 | 100 | 4.49 | 3.42 | 4.87 | 4.95 | 4.11 | 4.18 | 3.59 | 2.08 | 4.07 | 3.97 | 0.88 | 0 | 4.92E−05 | −3.68 | 12.9 |
| hsa-miR-382 | hsa-miR-382_st1 | 10.5 | 10.4 | 10.1 | 10.39 | 0.22 | 100 | 7.17 | 6.85 | 7.35 | 7.13 | 7.43 | 6.56 | 6.29 | 5.93 | 5.81 | 6.72 | 0.61 | 78 | 1.64E−06 | −3.67 | 12.7 |
| hsa- | hsa- | 5.98 | 7.12 | 5.92 | 6.34 | 0.68 | 100 | 2.25 | 1.96 | 3.79 | 3.63 | 2.69 | 2.17 | 3.59 | 1.29 | 2.74 | 2.68 | 0.86 | 0 | 5.56E−05 | −3.66 | 12.7 |
| cand206 | cand206_st1 | | | | | | | | | | | | | | | | | | | | | |
| hsa-miR- | hsa-miR- | 6.54 | 5.83 | 6.20 | 6.19 | 0.35 | 100 | 2.43 | 2.36 | 1.39 | 3.73 | 2.53 | 2.85 | 3.17 | 1.88 | 2.54 | 2.54 | 0.68 | 0 | 5.61E−06 | −3.64 | 12.5 |
| 410 | 410_st1 | | | | | | | | | | | | | | | | | | | | | |
| hsa-asg- | hsa-asg- | 8.31 | 8.21 | 8.55 | 8.36 | 0.17 | 100 | 5.92 | 4.49 | 5.04 | 6.08 | 5.09 | 4.87 | 4.14 | 2.93 | 4.07 | 4.73 | 0.97 | 22 | 9.80E−05 | −3.62 | 12.3 |
| 8411 | 8411_st2 | | | | | | | | | | | | | | | | | | | | | |
| Has- | hsa- | 6.22 | 7.16 | 7.67 | 7.01 | 0.73 | 100 | 4.61 | 4.43 | 2.66 | 3.40 | 2.69 | 2.69 | 2.78 | 3.20 | 4.24 | 3.41 | 0.81 | 0 | 4.61E−05 | −3.60 | 12.2 |
| miR144 | miR144_st2 | | | | | | | | | | | | | | | | | | | | | |
| hsa-asg- | hsa-asg- | 10.66 | 10.88 | 10.66 | 10.73 | 0.12 | 100 | 7.64 | 7.18 | 7.34 | 8.22 | 8.03 | 6.58 | 6.97 | 5.74 | 6.63 | 7.15 | 0.78 | 89 | 1.59E−05 | −3.58 | 12.0 |
| 10883 | 10883_st1 | | | | | | | | | | | | | | | | | | | | | |
| hsa-miR- | hsa-miR- | 6.03 | 5.88 | 5.45 | 5.79 | 0.30 | 100 | 1.85 | 2.16 | 4.12 | 3.34 | 2.69 | 1.01 | 2.78 | 2.53 | 0.21 | 2.30 | 1.18 | 0 | 5.93E−04 | −3.49 | 11.2 |
| 376b | 376b_st1 | | | | | | | | | | | | | | | | | | | | | |
| hsa-miR-101 | hsa-miR-101_st1 | 8.57 | 8.98 | 9.38 | 8.98 | 0.40 | 100 | 7.18 | 6.53 | 4.21 | 5.98 | 6.52 | 4.70 | 4.86 | 4.35 | 5.09 | 5.49 | 1.08 | 44 | 3.40E−04 | −3.49 | 11.2 |
| hsa-asg- | hsa-asg- | 8.74 | 7.64 | 7.26 | 7.88 | 0.77 | 100 | 4.09 | 5.64 | 3.54 | 4.30 | 4.39 | 4.97 | 3.17 | 4.14 | 5.46 | 4.41 | 0.82 | 11 | 7.69E−05 | −3.47 | 11.1 |
| 11338 | 11338_st2 | | | | | | | | | | | | | | | | | | | | | |
| hsa-asg- | hsa-asg- | 7.29 | 7.23 | 8.05 | 7.52 | 0.46 | 100 | 4.76 | 4.81 | 3.91 | 4.66 | 3.89 | 4.24 | 4.07 | 3.74 | 3.53 | 4.18 | 0.47 | 0 | 8.20E−07 | −3.34 | 10.2 |
| 9687 | 9687_st1 | | | | | | | | | | | | | | | | | | | | | |
| hsa-miR- | hsa-miR- | 5.02 | 5.96 | 5.87 | 5.62 | 0.52 | 67 | 3.45 | 2.36 | 2.18 | 2.33 | 2.53 | 2.69 | 0.76 | 2.78 | 2.10 | 2.35 | 0.72 | 0 | 3.10E−05 | −3.27 | 9.6 |
| 377 | 377_st1 | | | | | | | | | | | | | | | | | | | | | |
| hsa- | hsa- | 6.59 | 7.01 | 5.82 | 6.47 | 0.60 | 100 | 2.61 | 4.16 | 3.67 | 2.51 | 3.68 | 3.69 | 2.64 | 2.78 | 3.25 | 3.22 | 0.60 | 0 | 1.07E−05 | −3.25 | 9.5 |
| cand207 | cand207_st1 | | | | | | | | | | | | | | | | | | | | | |
| hsa-miR- | hsa-miR- | 7.44 | 7.71 | 7.89 | 7.68 | 0.23 | 100 | 5.25 | 4.86 | 2.86 | 5.10 | 4.08 | 4.65 | 4.49 | 4.28 | 4.40 | 4.44 | 0.70 | 0 | 1.78E−05 | −3.24 | 9.5 |
| 501 | 501_st1 | | | | | | | | | | | | | | | | | | | | | |
| hsa-miR- | hsa-miR- | 9.97 | 10.1 | 9.94 | 10.02 | 0.11 | 100 | 7.33 | 5.89 | 7.21 | 8.24 | 6.45 | 5.41 | 5.19 | 6.07 | 9.36 | 6.79 | 1.37 | 78 | 2.80E−03 | −3.22 | 9.3 |
| 203 | 203_st2 | | | | | | | | | | | | | | | | | | | | | |
| hsa-miR-154* | hsa-miR-154-_st2 | 7.35 | 7.51 | 7.81 | 7.56 | 0.23 | 100 | 5.83 | 3.53 | 4.21 | 4.99 | 4.63 | 3.95 | 4.27 | 3.20 | 4.40 | 4.33 | 0.78 | 11 | 4.39E−05 | −3.22 | 9.3 |
| hsa-miR- | hsa-miR- | 8.04 | 8.18 | 8.01 | 8.08 | 0.09 | 100 | 4.71 | 5.08 | 4.39 | 4.97 | 5.05 | 5.64 | 3.68 | 5.48 | 4.84 | 4.87 | 0.58 | 0 | 3.37E−06 | −3.21 | 9.2 |
| 202 | 202_st1 | | | | | | | | | | | | | | | | | | | | | |
| hsa-miR- | hsa-miR- | 8.97 | 8.38 | 8.90 | 8.75 | 0.32 | 100 | 5.11 | 5.30 | 6.01 | 6.29 | 5.74 | 5.68 | 5.40 | 5.90 | 4.73 | 5.57 | 0.49 | 78 | 1.12E−06 | −3.18 | 9.0 |
| 542-3p | 542-3p_st1 | | | | | | | | | | | | | | | | | | | | | |
| hsa-miR- | hsa-miR- | 8.47 | 7.93 | 7.62 | 8.00 | 0.43 | 100 | 5.29 | 5.08 | 4.75 | 4.66 | 4.74 | 5.09 | 4.54 | 4.28 | 5.09 | 4.84 | 0.32 | 11 | 8.37E−08 | −3.17 | 9.0 |
| 510 | 510_st2 | | | | | | | | | | | | | | | | | | | | | |
| hsa-asg- | hsa-asg- | 8.58 | 8.87 | 8.47 | 8.64 | 0.21 | 100 | 6.06 | 5.72 | 5.28 | 6.77 | 6.26 | 5.43 | 5.46 | 4.21 | 4.16 | 5.48 | 0.87 | 44 | 1.28E−04 | −3.15 | 8.9 |
| 14176 | 14176_st1 | | | | | | | | | | | | | | | | | | | | | |
| hsa-miR- | hsa-miR- | 11.5 | 11.2 | 11.5 | 11.47 | 0.17 | 100 | 9.72 | 8.56 | 8.33 | 8.35 | 8.59 | 8.08 | 8.02 | 8.44 | 6.88 | 8.33 | 0.74 | 89 | 3.21E−05 | −3.14 | 8.8 |
| 132 | 132_st1 | | | | | | | | | | | | | | | | | | | | | |
| hsa-asg- | hsa-asg- | 5.63 | 5.60 | 5.54 | 5.59 | 0.04 | 100 | 1.45 | 2.54 | 3.23 | 1.82 | 2.37 | 2.44 | 3.29 | 3.07 | 2.10 | 2.48 | 0.63 | 0 | 9.26E−06 | −3.11 | 8.7 |
| 14216 | 14216_st1 | | | | | | | | | | | | | | | | | | | | | |
| hsa-miR-149 | hsa-miR-149_st2 | 5.07 | 6.73 | 6.64 | 6.15 | 0.93 | 67 | 4.49 | 3.87 | 1.79 | 4.15 | 2.76 | 1.48 | 2.48 | 3.38 | 3.17 | 3.07 | 1.03 | 0 | 1.04E−03 | −3.08 | 8.5 |
| hsa-asg-14230 | hsa-asg-14230_st1 | 7.04 | 6.95 | 6.68 | 6.89 | 0.19 | 100 | 4.31 | 3.74 | 4.39 | 4.58 | 3.33 | 3.48 | 2.78 | 3.95 | 4.07 | 3.85 | 0.57 | 0 | 5.18E−06 | −3.04 | 8.2 |
| hsa-asg-10202 | hsa-asg-10202_st2 | 5.95 | 6.15 | 6.30 | 6.13 | 0.17 | 67 | 4.71 | 2.06 | 3.31 | 5.25 | 3.10 | 1.97 | 2.48 | 3.38 | 1.74 | 3.11 | 1.22 | 0 | 2.00E−03 | −3.02 | 8.1 |
| hsa-miR- | hsa-miR- | 9.83 | 9.56 | 9.74 | 9.71 | 0.14 | 100 | 6.40 | 7.30 | 7.22 | 6.96 | 6.63 | 7.66 | 5.73 | 5.86 | 6.60 | 6.71 | 0.65 | 100 | 1.59E−05 | −3.00 | 8.0 |
| 494 | 494_st1 | | | | | | | | | | | | | | | | | | | | | |
| hsa-miR- | hsa- | 8.90 | 8.70 | 8.58 | 8.73 | 0.16 | 100 | 6.83 | 6.55 | 6.85 | 6.43 | 6.38 | 7.10 | 5.40 | 5.79 | 6.89 | 6.47 | 0.55 | 89 | 5.02E−05 | −2.26 | 4.8 |
| 494 | miR61_st2 | | | | | | | | | | | | | | | | | | | | | |
| hsa-miR- | hsa-miR- | 11.3 | 11.5 | 11.7 | 11.53 | 0.20 | 100 | 9.29 | 8.99 | 7.93 | 9.15 | 8.63 | 8.44 | 7.79 | 7.91 | 8.61 | 8.53 | 0.56 | 100 | 4.53E−06 | −3.00 | 8.0 |
| 660 | 660_st1 | | | | | | | | | | | | | | | | | | | | | |
| hsa-miR- | hsa-miR- | 8.40 | 8.17 | 8.53 | 8.37 | 0.18 | 100 | 6.27 | 5.73 | 6.17 | 5.72 | 5.17 | 5.11 | 4.59 | 4.98 | 4.76 | 5.39 | 0.61 | 11 | 1.01E−05 | −2.98 | 7.9 |
| 212 | 212_st2 | | | | | | | | | | | | | | | | | | | | | |
| hsa-asg- | hsa-asg- | 9.31 | 9.71 | 9.17 | 9.39 | 0.28 | 100 | 6.62 | 6.49 | 6.49 | 7.56 | 7.45 | 5.68 | 6.35 | 5.00 | 6.23 | 6.43 | 0.79 | 67 | 1.05E−04 | −2.96 | 7.8 |
| 13304 | 13304_st2 | | | | | | | | | | | | | | | | | | | | | |
| hsa-asg- | hsa-asg- | 8.77 | 9.43 | 8.47 | 8.89 | 0.49 | 100 | 6.42 | 6.07 | 5.71 | 6.89 | 6.85 | 4.84 | 5.33 | 5.29 | 6.16 | 5.95 | 0.71 | 0 | 6.65E−05 | −2.94 | 7.7 |
| 279 | 279_st2 | | | | | | | | | | | | | | | | | | | | | |
| hsa-miR-487a | hsa-miR-487a_st2 | 5.38 | 5.83 | 5.12 | 5.44 | 0.36 | 33 | 2.25 | 2.87 | 2.66 | 3.40 | 2.19 | 3.26 | 0.91 | 2.27 | 2.92 | 2.53 | 0.75 | 0 | 8.09E−05 | −2.91 | 7.5 |
| hsa-miR- | hsa-asg- | 6.01 | 6.23 | 5.80 | 6.01 | 0.21 | 100 | 4.09 | 3.64 | 3.91 | 3.40 | 3.89 | 3.78 | 3.68 | 3.74 | 3.65 | 3.75 | 0.20 | 0 | 1.15E−08 | −2.26 | 4.8 |
| 487a | 6915_st1 | | | | | | | | | | | | | | | | | | | | | |
| hsa-miR-9* | hsa-miR-9-_st2 | 8.71 | 8.87 | 7.74 | 8.44 | 0.61 | 100 | 6.20 | 6.10 | 5.57 | 6.11 | 5.41 | 5.87 | 4.94 | 4.73 | 5.23 | 5.57 | 0.54 | 44 | 1.47E−05 | −2.87 | 7.3 |
| hsa-asg- | hsa-asg-13127_st2 | 9.08 | 9.39 | 9.53 | 9.33 | 0.23 | 100 | 7.75 | 7.36 | 5.86 | 6.68 | 6.05 | 6.84 | 5.66 | 5.08 | 7.13 | 6.49 | 0.88 | 67 | 3.14E−04 | −2.84 | 7.2 |
| 13127 | | | | | | | | | | | | | | | | | | | | | | |
| hsa-asg- | hsa-asg- | 9.09 | 9.42 | 9.51 | 9.34 | 0.22 | 100 | 7.77 | 7.24 | 6.28 | 7.01 | 5.92 | 6.62 | 4.98 | 5.81 | 6.89 | 6.50 | 0.85 | 89 | 2.42E−04 | −2.84 | 7.1 |
| 922 | 922_st1 | | | | | | | | | | | | | | | | | | | | | |
| hsa-miR-214 | hsa-miR-214_st1 | 12.3 | 12.4 | 12.5 | 12.45 | 0.12 | 100 | 9.76 | 9.55 | 9.76 | 10.9 | 10.3 | 9.93 | 9.27 | 8.44 | 8.52 | 9.62 | 0.81 | 100 | 1.65E−04 | −2.83 | 7.1 |
| hsa-miR- | hsa- | 11.5 | 11.6 | 12.3 | 11.83 | 0.46 | 100 | 10.4 | 7.98 | 9.74 | 9.88 | 8.96 | 7.34 | 9.32 | 9.06 | 8.54 | 9.03 | 0.97 | 100 | 8.41E−04 | −2.80 | 7.0 |
| 92b | miR30_st1 | | | | | | | | | | | | | | | | | | | | | |
| hsa-miR- | hsa-miR- | 11.9 | 11.9 | 12.5 | 12.15 | 0.33 | 100 | 10.9 | 8.50 | 10.1 | 10.2 | 9.25 | 7.88 | 9.75 | 9.23 | 8.88 | 9.42 | 0.94 | 100 | 7.25E−04 | −2.73 | 6.7 |
| 92b | 92b_st1 | | | | | | | | | | | | | | | | | | | | | |
| hsa-miR- | hsa-miR- | 5.66 | 5.94 | 5.97 | 5.86 | 0.17 | 100 | 3.76 | 3.29 | 3.06 | 3.15 | 3.85 | 2.17 | 2.64 | 3.32 | 2.54 | 3.09 | 0.56 | 0 | 8.97E−06 | −2.77 | 6.8 |
| 502 | 502_st1 | | | | | | | | | | | | | | | | | | | | | |
| hsa-asg- | hsa-asg- | 5.73 | 6.12 | 5.97 | 5.94 | 0.20 | 100 | 4.17 | 2.71 | 2.66 | 3.68 | 3.44 | 2.44 | 3.05 | 2.27 | 4.16 | 3.17 | 0.72 | 0 | 7.98E−05 | −2.76 | 6.8 |
| 9695 | 9695_st2 | | | | | | | | | | | | | | | | | | | | | |
| hsa-asg- | hsa-asg- | 6.76 | 7.02 | 6.92 | 6.90 | 0.13 | 100 | 4.85 | 4.30 | 4.98 | 4.76 | 3.72 | 2.85 | 4.07 | 3.32 | 4.54 | 4.16 | 0.73 | 0 | 9.46E−05 | −2.75 | 6.7 |
| 9681 | 9681_st1 | | | | | | | | | | | | | | | | | | | | | |
| hsa-asg- | hsa-asg- | 6.52 | 6.82 | 6.56 | 6.63 | 0.16 | 100 | 4.90 | 2.06 | 3.60 | 5.83 | 4.85 | 2.85 | 4.73 | 3.78 | 2.44 | 3.89 | 1.28 | 0 | 4.98E−03 | −2.74 | 6.7 |
| 13284 | 13284_st1 | | | | | | | | | | | | | | | | | | | | | |
| hsa-asg- | hsa-asg- | 6.35 | 5.40 | 4.75 | 5.50 | 0.80 | 33 | 1.25 | 2.63 | 5.30 | 4.63 | 1.83 | 2.53 | 2.92 | 1.39 | 2.44 | 2.77 | 1.38 | 0 | 9.68E−03 | −2.73 | 6.6 |
| 14065 | 14065_st2 | | | | | | | | | | | | | | | | | | | | | |
| hsa-asg- | hsa-asg- | 5.38 | 5.34 | 5.57 | 5.43 | 0.13 | 33 | 2.93 | 2.36 | 2.66 | 3.52 | 3.72 | 2.53 | 2.78 | 1.48 | 2.54 | 2.72 | 0.65 | 0 | 4.17E−05 | −2.71 | 6.5 |
| 14174 | 14174_st1 | | | | | | | | | | | | | | | | | | | | | |
| Has- | hsa- | 10.7 | 11.1 | 11.2 | 11.06 | 0.25 | 100 | 8.90 | 8.31 | 8.71 | 8.69 | 8.14 | 7.82 | 7.95 | 8.41 | 8.42 | 8.37 | 0.36 | 100 | 3.47E−07 | −2.69 | 6.4 |
| miR102 | miR102_st2 | | | | | | | | | | | | | | | | | | | | | |
| hsa-miR- | hsa-miR- | 8.00 | 7.40 | 8.33 | 7.91 | 0.47 | 100 | 5.83 | 4.16 | 5.80 | 6.00 | 5.70 | 4.75 | 5.09 | 5.32 | 4.60 | 5.25 | 0.64 | 33 | 6.73E−05 | −2.66 | 6.3 |
| 455 | 455_st1 | | | | | | | | | | | | | | | | | | | | | |
| hsa-asg- | hsa-asg-8878_st2 | 11.8 | 11.6 | 11.9 | 11.83 | 0.18 | 100 | 10.9 | 9.01 | 9.13 | 11.2 | 9.75 | 8.53 | 10.2 | 8.11 | 5.85 | 9.20 | 1.64 | 100 | 2.26E−02 | −2.63 | 6.2 |
| 8878 | | | | | | | | | | | | | | | | | | | | | | |
| hsa-miR-345 | hsa-miR-345_st2 | 8.67 | 9.37 | 8.86 | 8.97 | 0.36 | 100 | 6.73 | 7.38 | 6.31 | 6.47 | 6.67 | 7.02 | 5.12 | 5.34 | 6.15 | 6.35 | 0.74 | 78 | 1.75E−04 | −2.61 | 6.1 |
| hsa-asg- | hsa-asg- | 9.16 | 9.52 | 9.41 | 9.36 | 0.18 | 100 | 8.06 | 7.48 | 5.53 | 8.01 | 7.35 | 7.37 | 6.68 | 5.32 | 5.00 | 6.75 | 1.18 | 78 | 4.18E−03 | −2.61 | 6.1 |
| 4557 | 4557_st2 | | | | | | | | | | | | | | | | | | | | | |
| hsa-miR- | hsa-miR- | 9.85 | 10.0 | 10.2 | 10.07 | 0.22 | 100 | 8.38 | 8.32 | 7.31 | 8.03 | 8.04 | 6.51 | 6.91 | 6.53 | 7.20 | 7.47 | 0.74 | 100 | 1.69E−04 | −2.60 | 6.1 |
| 19b | 19b_st2 | | | | | | | | | | | | | | | | | | | | | |
| hsa-asg- | hsa-asg- | 6.60 | 6.42 | 6.33 | 6.45 | 0.14 | 100 | 3.85 | 3.02 | 4.87 | 4.66 | 4.00 | 4.18 | 2.48 | 4.21 | 3.39 | 3.85 | 0.77 | 0 | 2.12E−04 | −2.60 | 6.1 |
| 3376 | 3376_st1 | | | | | | | | | | | | | | | | | | | | | |
| hsa-asg- | hsa-asg- | 6.92 | 5.89 | 5.85 | 6.22 | 0.61 | 100 | 5.07 | 3.53 | 4.47 | 4.15 | 3.39 | 1.19 | 3.05 | 4.07 | 3.97 | 3.65 | 1.10 | 0 | 3.65E−03 | −2.57 | 5.9 |
| 14208 | 14208_st1 | | | | | | | | | | | | | | | | | | | | | |
| hsa-miR- | hsa-miR- | 10.6 | 11.1 | 11.1 | 10.98 | 0.27 | 100 | 8.75 | 8.43 | 8.78 | 8.81 | 8.19 | 7.84 | 8.13 | 8.43 | 8.51 | 8.43 | 0.33 | 100 | 2.96E−07 | −2.56 | 5.9 |
| 500 | 500_st1 | | | | | | | | | | | | | | | | | | | | | |
| hsa-asg- | hsa-asg- | 5.77 | 6.15 | 6.96 | 6.30 | 0.61 | 100 | 4.90 | 2.87 | 4.02 | 4.26 | 3.93 | 2.69 | 3.68 | 3.44 | 4.24 | 3.78 | 0.70 | 0 | 2.50E−04 | −2.52 | 5.7 |
| 12964 | 12964_st2 | | | | | | | | | | | | | | | | | | | | | |
| hsa-miR- | hsa-miR- | 11.5 | 11.5 | 11.7 | 11.62 | 0.14 | 100 | 10.5 | 9.57 | 9.77 | 9.80 | 8.72 | 9.01 | 9.09 | 7.97 | 7.54 | 9.11 | 0.94 | 100 | 1.17E−03 | −2.51 | 5.7 |
| 423 | 423_st1 | | | | | | | | | | | | | | | | | | | | | |
| hsa-asg- | hsa-asg- | 6.82 | 7.13 | 7.04 | 7.00 | 0.16 | 100 | 5.62 | 5.68 | 2.96 | 5.39 | 5.57 | 4.03 | 3.59 | 2.70 | 4.81 | 4.48 | 1.19 | 11 | 5.40E−03 | −2.51 | 5.7 |
| 10391 | 10391_st2 | | | | | | | | | | | | | | | | | | | | | |
| hsa-miR- | hsa-miR- | 7.83 | 8.11 | 7.61 | 7.85 | 0.25 | 100 | 6.08 | 5.79 | 4.93 | 7.23 | 6.18 | 4.55 | 4.94 | 3.54 | 4.95 | 5.36 | 1.08 | 44 | 3.29E−03 | −2.49 | 5.6 |
| 189 | 189_st1 | | | | | | | | | | | | | | | | | | | | | |
| hsa-asg- | hsa-asg- | 5.51 | 5.80 | 6.48 | 5.93 | 0.50 | 67 | 4.90 | 3.16 | 3.91 | 4.63 | 3.68 | 2.99 | 3.29 | 2.93 | 1.62 | 3.46 | 0.98 | 0 | 2.16E−03 | −2.47 | 5.5 |
| 1701 | 1701_st2 | | | | | | | | | | | | | | | | | | | | | |
| hsa-miR-329 | hsa-miR-329_st1 | 5.73 | 6.31 | 5.57 | 5.87 | 0.39 | 100 | 3.76 | 3.02 | 4.61 | 3.28 | 4.58 | 2.85 | 2.78 | 3.32 | 2.74 | 3.44 | 0.73 | 0 | 2.99E−04 | −2.43 | 5.4 |
| hsa-miR- | hsa-asg- | 5.25 | 5.58 | 5.69 | 5.51 | 0.23 | 100 | 1.65 | 3.16 | 3.79 | 3.73 | 4.42 | 2.35 | 3.68 | 2.78 | 3.09 | 3.18 | 0.84 | 0 | 9.98E−04 | −2.32 | 5.0 |
| 329 | 13589_st2 | | | | | | | | | | | | | | | | | | | | | |
| hsa-miR- | hsa-asg- | 5.49 | 5.83 | 6.10 | 5.81 | 0.30 | 67 | 4.09 | 2.87 | 4.21 | 3.40 | 4.24 | 3.48 | 4.00 | 2.62 | 3.53 | 3.61 | 0.59 | 0 | 1.16E−04 | −2.20 | 4.6 |
| 329 | 13204_st2 | | | | | | | | | | | | | | | | | | | | | |
| hsa-miR- | hsa-asg- | 8.38 | 8.64 | 8.62 | 8.55 | 0.15 | 100 | 7.75 | 7.03 | 6.53 | 7.45 | 6.62 | 5.05 | 5.71 | 3.83 | 5.23 | 6.13 | 1.28 | 67 | 1.01E−02 | −2.41 | 5.3 |
| 140 | 14239_st1 | | | | | | | | | | | | | | | | | | | | | |
| hsa-miR- | hsa-miR- | 7.99 | 8.60 | 8.22 | 8.27 | 0.31 | 100 | 7.73 | 6.16 | 6.37 | 7.22 | 6.63 | 5.50 | 4.78 | 4.78 | 5.27 | 6.05 | 1.05 | 44 | 5.48E−03 | −2.23 | 4.7 |
| 140 | 140_st2 | | | | | | | | | | | | | | | | | | | | | |
| hsa-miR-9 | hsa-miR-9_st2 | 5.02 | 6.55 | 5.51 | 5.70 | 0.78 | 67 | 3.45 | 3.53 | 2.86 | 3.28 | 3.63 | 2.17 | 3.50 | 3.32 | 4.16 | 3.32 | 0.55 | 0 | 1.51E−04 | −2.37 | 5.2 |
| hsa-miR-9 | hsa-cand90_st2 | 3.52 | 5.78 | 4.75 | 4.68 | 1.13 | 33 | 3.56 | 3.16 | 2.66 | 3.01 | 2.83 | 2.17 | 2.64 | 1.68 | 3.65 | 2.82 | 0.63 | 0 | 4.12E−03 | −1.87 | 3.6 |
| hsa-asg- | hsa-asg- | 6.82 | 5.66 | 5.66 | 6.05 | 0.67 | 33 | 3.21 | 3.78 | 5.12 | 3.08 | 2.69 | 2.53 | 3.29 | 4.76 | 4.70 | 3.68 | 0.96 | 0 | 2.90E−03 | −2.37 | 5.2 |
| 3036 | 3036_st1 | | | | | | | | | | | | | | | | | | | | | |
| hsa-miR- | hsa-miR- | 11.49 | 11.94 | 11.76 | 11.73 | 0.23 | 100 | 10.20 | 9.76 | 9.14 | 9.80 | 9.38 | 9.47 | 9.04 | 8.51 | 9.05 | 9.37 | 0.50 | 100 | 1.75E−05 | −2.36 | 5.1 |
| 151 | 151_st2 | | | | | | | | | | | | | | | | | | | | | |
| hsa-miR- | hsa-miR- | 9.86 | 7.74 | 7.99 | 8.53 | 1.16 | 100 | 5.78 | 5.58 | 6.77 | 6.13 | 6.26 | 6.02 | 6.38 | 6.35 | 6.44 | 6.19 | 0.36 | 100 | 1.84E−04 | −2.34 | 5.1 |
| 506 | 506_st2 | | | | | | | | | | | | | | | | | | | | | |
| hsa-miR-574 | hsa-miR-574_st1 | 10.7 | 11.7 | 11.6 | 11.36 | 0.55 | 100 | 9.35 | 8.42 | 9.39 | 10.2 | 9.96 | 8.12 | 9.20 | 8.06 | 8.47 | 9.02 | 0.80 | 100 | 8.93E−04 | −2.34 | 5.1 |
| hsa-asg- | hsa-asg- | 7.27 | 7.92 | 7.42 | 7.54 | 0.34 | 100 | 5.62 | 4.76 | 5.71 | 5.53 | 5.68 | 5.20 | 4.78 | 5.19 | 4.73 | 5.24 | 0.41 | 22 | 5.87E−06 | −2.29 | 4.9 |
| 5827 | 5827_st2 | | | | | | | | | | | | | | | | | | | | | |
| hsa-miR- | hsa-miR- | 12.6 | 12.8 | 12.9 | 12.82 | 0.12 | 100 | 11.0 | 10.5 | 10.5 | 11.4 | 11.1 | 10.1 | 10.1 | 9.52 | 10.3 | 10.5 | 0.59 | 100 | 7.55E−05 | −2.28 | 4.9 |
| 99b | 99b_st1 | | | | | | | | | | | | | | | | | | | | | |
| hsa-miR- | hsa-asg- | 12.7 | 12.9 | 12.9 | 12.89 | 0.14 | 100 | 11.2 | 10.6 | 10.6 | 11.6 | 11.3 | 10.3 | 10.3 | 9.55 | 10.5 | 10.7 | 0.65 | 100 | 2.19E−04 | −2.19 | 4.6 |
| 99b | 14196_st2 | | | | | | | | | | | | | | | | | | | | | |
| hsa-miR- | hsa-miR- | 9.32 | 9.61 | 8.82 | 9.25 | 0.40 | 100 | 7.43 | 7.60 | 6.23 | 8.75 | 7.86 | 6.49 | 6.51 | 5.62 | 6.69 | 7.02 | 0.96 | 33 | 3.53E−03 | −2.23 | 4.7 |
| 497 | 497_st1 | | | | | | | | | | | | | | | | | | | | | |
| hsa-miR- | hsa- | 10.3 | 10.5 | 9.58 | 10.16 | 0.52 | 100 | 8.20 | 8.56 | 7.51 | 9.37 | 8.88 | 7.78 | 7.45 | 7.13 | 7.83 | 8.08 | 0.74 | 89 | 1.18E−03 | −2.08 | 4.2 |
| 497 | miR43_st1 | | | | | | | | | | | | | | | | | | | | | |
| hsa-miR- | hsa- | 12.0 | 12.4 | 12.5 | 12.35 | 0.25 | 100 | 10.4 | 9.85 | 9.72 | 10.9 | 10.8 | 9.26 | 10.0 | 9.56 | 10.6 | 10.1 | 0.59 | 100 | 1.06E−04 | −2.22 | 4.7 |
| 130a | cand144_st1 | | | | | | | | | | | | | | | | | | | | | |
| hsa-miR-130a | hsa-miR-130a_st1 | 12.0 | 12.3 | 12.4 | 12.27 | 0.20 | 100 | 10.3 | 9.96 | 9.71 | 10.9 | 10.7 | 9.21 | 10.0 | 9.63 | 10.4 | 10.1 | 0.56 | 100 | 8.75E−05 | −2.15 | 4.4 |
| hsa-miR- | hsa- | 6.65 | 7.50 | 7.12 | 7.09 | 0.42 | 100 | 5.45 | 4.81 | 5.37 | 6.66 | 4.11 | 4.43 | 4.82 | 4.58 | 3.87 | 4.90 | 0.84 | 22 | 1.71E−03 | −2.19 | 4.6 |
| 499 | miR12_st1 | | | | | | | | | | | | | | | | | | | | | |
| hsa-miR- | hsa-miR- | 6.54 | 7.32 | 6.76 | 6.87 | 0.40 | 100 | 5.32 | 4.66 | 4.75 | 6.58 | 4.53 | 4.18 | 5.05 | 4.28 | 4.60 | 4.88 | 0.73 | 22 | 1.30E−03 | −1.99 | 4.0 |
| 499 | 499_st1 | | | | | | | | | | | | | | | | | | | | | |
| hsa-miR- | hsa-miR- | 9.28 | 9.64 | 9.59 | 9.51 | 0.19 | 100 | 7.43 | 7.71 | 7.93 | 7.61 | 7.47 | 7.14 | 6.94 | 6.57 | 7.06 | 7.32 | 0.42 | 100 | 7.51E−06 | −2.19 | 4.6 |
| 362 | 362_st1 | | | | | | | | | | | | | | | | | | | | | |
| hsa-asg- | hsa-asg- | 6.64 | 7.25 | 7.29 | 7.06 | 0.37 | 100 | 4.66 | 4.37 | 4.02 | 6.18 | 5.09 | 4.21 | 5.16 | 5.22 | 5.05 | 4.88 | 0.66 | 11 | 3.19E−04 | −2.18 | 4.5 |
| 7465 | 7465_st2 | | | | | | | | | | | | | | | | | | | | | |
| hsa-miR-550 | hsa-miR-550-2_st1 | 4.84 | 5.78 | 5.40 | 5.34 | 0.47 | 33 | 3.76 | 3.53 | 5.09 | 4.79 | 2.61 | 1.19 | 1.97 | 2.45 | 3.09 | 3.16 | 1.27 | 0 | 1.83E−02 | −2.17 | 4.5 |
| hsa-asg- | hsa-asg- | 7.97 | 8.38 | 8.42 | 8.25 | 0.25 | 100 | 5.92 | 6.06 | 6.67 | 6.74 | 6.18 | 6.02 | 6.12 | 4.58 | 6.44 | 6.08 | 0.63 | 78 | 2.13E−04 | −2.17 | 4.5 |
| 11883 | 11883_st1 | | | | | | | | | | | | | | | | | | | | | |
| hsa-miR- | hsa-miR- | 12.6 | 12.6 | 12.9 | 12.76 | 0.13 | 100 | 12.1 | 11.1 | 11.5 | 10.5 | 10.2 | 11.0 | 10.2 | 9.18 | 9.38 | 10.6 | 0.96 | 100 | 3.85E−03 | −2.16 | 4.5 |
| 148a | 148a_st1 | | | | | | | | | | | | | | | | | | | | | |
| hsa-asg- | hsa-asg- | 6.65 | 7.96 | 8.10 | 7.57 | 0.80 | 100 | 5.68 | 5.19 | 5.28 | 6.40 | 6.25 | 5.59 | 4.98 | 4.47 | 5.35 | 5.46 | 0.60 | 33 | 6.38E−04 | −2.11 | 4.3 |
| 3145 | 3145_st1 | | | | | | | | | | | | | | | | | | | | | |
| hsa-miR- | hsa-miR- | 9.95 | 9.89 | 10.5 | 10.12 | 0.34 | 100 | 9.76 | 7.76 | 8.97 | 9.69 | 7.39 | 7.36 | 7.88 | 7.63 | 6.14 | 8.06 | 1.19 | 89 | 1.67E−02 | −2.06 | 4.2 |
| 505 | 505_st1 | | | | | | | | | | | | | | | | | | | | | |
| hsa-asg- | hsa-asg- | 5.66 | 5.80 | 5.38 | 5.62 | 0.21 | 100 | 4.81 | 3.74 | 3.39 | 3.46 | 4.42 | 3.99 | 3.40 | 1.68 | 3.39 | 3.59 | 0.87 | 0 | 3.15E−03 | −2.03 | 4.1 |
| 11749 | 11749_st1 | | | | | | | | | | | | | | | | | | | | | |
| hsa- | hsa- | 4.92 | 6.04 | 5.76 | 5.57 | 0.58 | 33 | 3.66 | 3.96 | 3.96 | 4.43 | 3.49 | 3.19 | 1.60 | 3.87 | 3.92 | 3.57 | 0.81 | 0 | 2.97E−03 | −2.01 | 4.0 |
| cand863 | cand863_st2 | | | | | | | | | | | | | | | | | | | | | |
| hsa-miR- | hsa- | 5.63 | 5.71 | 5.20 | 5.51 | 0.27 | 67 | 3.93 | 2.54 | 1.92 | 5.43 | 5.30 | 2.53 | 3.17 | 3.20 | 3.65 | 3.52 | 1.21 | 0 | 2.09E−02 | −1.99 | 4.0 |
| 193a | cand178_st1 | | | | | | | | | | | | | | | | | | | | | |
| hsa-asg- | hsa-asg- | 8.39 | 8.52 | 9.21 | 8.71 | 0.44 | 100 | 6.79 | 6.98 | 7.19 | 7.29 | 6.98 | 6.52 | 6.22 | 6.32 | 6.27 | 6.73 | 0.41 | 22 | 3.16E−05 | −1.98 | 3.9 |
| 12346 | 12346_st2 | | | | | | | | | | | | | | | | | | | | | |
| hsa-miR-222 | hsa-miR-222_st2 | 11.7 | 11.4 | 11.9 | 11.70 | 0.26 | 100 | 10.4 | 9.56 | 9.54 | 10.2 | 9.75 | 9.33 | 9.52 | 9.38 | 9.86 | 9.73 | 0.37 | 100 | 7.45E−06 | −1.97 | 3.9 |
| hsa-asg- | hsa-asg- | 7.75 | 8.21 | 8.38 | 8.11 | 0.32 | 100 | 7.46 | 6.04 | 7.10 | 7.36 | 4.72 | 5.57 | 6.22 | 7.09 | 3.77 | 6.15 | 1.28 | 78 | 2.83E−02 | −1.97 | 3.9 |
| 13230 | 13230_st2 | | | | | | | | | | | | | | | | | | | | | |
| hsa-miR- | hsa-miR- | 6.92 | 6.61 | 6.90 | 6.81 | 0.18 | 100 | 4.66 | 5.28 | 4.72 | 5.06 | 4.72 | 5.40 | 4.33 | 4.49 | 5.12 | 4.86 | 0.37 | 0 | 5.79E−06 | −1.95 | 3.9 |
| 370 | 370_st1 | | | | | | | | | | | | | | | | | | | | | |
| hsa-miR- | hsa- | 4.75 | 5.52 | 5.20 | 5.16 | 0.39 | 33 | 3.45 | 2.54 | 3.67 | 4.15 | 3.72 | 2.85 | 3.59 | 1.68 | 3.25 | 3.21 | 0.75 | 0 | 1.78E−03 | −1.94 | 3.8 |
| 135b | cand78_st1 | | | | | | | | | | | | | | | | | | | | | |
| hsa-miR- | hsa-miR- | 12.7 | 12.6 | 13.1 | 12.84 | 0.25 | 100 | 11.2 | 11.1 | 11.2 | 11.4 | 11.4 | 10.8 | 10.4 | 10.1 | 10.0 | 10.9 | 0.55 | 100 | 1.85E−04 | −1.94 | 3.8 |
| 320 | 320_st1 | | | | | | | | | | | | | | | | | | | | | |
| hsa-miR- | hsa-miR- | 7.19 | 7.99 | 7.17 | 7.45 | 0.47 | 100 | 6.66 | 5.97 | 5.21 | 6.67 | 5.29 | 5.13 | 5.02 | 4.25 | 5.44 | 5.51 | 0.79 | 33 | 2.78E−03 | −1.94 | 3.8 |
| 339 | 339_st1 | | | | | | | | | | | | | | | | | | | | | |
| hsa-asg- | hsa-asg- | 5.90 | 6.08 | 6.20 | 6.06 | 0.15 | 33 | 5.18 | 3.96 | 5.01 | 4.58 | 4.42 | 4.10 | 2.32 | 4.25 | 3.46 | 4.14 | 0.86 | 0 | 3.99E−03 | −1.92 | 3.8 |
| 5829 | 5829_st1 | | | | | | | | | | | | | | | | | | | | | |
| hsa-asg- | hsa-asg- | 13.3 | 13.4 | 13.5 | 13.48 | 0.10 | 100 | 12.2 | 11.9 | 11.2 | 12.2 | 12.0 | 11.4 | 11.3 | 10.4 | 11.4 | 11.6 | 0.58 | 100 | 3.05E−04 | −1.88 | 3.7 |
| 11199 | 11199_st2 | | | | | | | | | | | | | | | | | | | | | |
| hsa-miR-641 | hsa-miR-641_st1 | 4.41 | 5.94 | 4.58 | 4.98 | 0.84 | 33 | 4.09 | 2.87 | 3.79 | 2.77 | 2.19 | 3.54 | 3.68 | 2.62 | 2.33 | 3.10 | 0.69 | 0 | 2.95E−03 | −1.88 | 3.7 |
| hsa-miR- | hsa-asg- | 7.26 | 8.14 | 8.24 | 7.88 | 0.54 | 100 | 6.61 | 5.82 | 6.85 | 6.61 | 5.63 | 5.68 | 5.69 | 5.81 | 5.53 | 6.02 | 0.51 | 67 | 3.07E−04 | −1.85 | 3.6 |
| 181d | 13508_st1 | | | | | | | | | | | | | | | | | | | | | |
| hsa-miR- | hsa-miR- | 9.68 | 10.2 | 10.4 | 10.11 | 0.38 | 100 | 9.13 | 7.83 | 8.91 | 8.93 | 7.59 | 7.96 | 8.28 | 8.21 | 8.02 | 8.32 | 0.54 | 100 | 3.86E−04 | −1.80 | 3.5 |
| 181d | 181d_st1 | | | | | | | | | | | | | | | | | | | | | |
| hsa-miR- | hsa- | 9.38 | 9.90 | 10.2 | 9.84 | 0.43 | 100 | 8.97 | 8.22 | 8.99 | 8.80 | 8.02 | 8.25 | 8.10 | 8.17 | 7.88 | 8.38 | 0.42 | 100 | 4.30E−04 | −1.46 | 2.8 |
| 181d | miR74_st1 | | | | | | | | | | | | | | | | | | | | | |
| hsa-miR-28 | hsa-miR- | 12.0 | 12.3 | 12.5 | 12.30 | 0.25 | 100 | 11.1 | 10.7 | 10.0 | 11.0 | 10.8 | 10.1 | 10.1 | 9.40 | 10.5 | 10.4 | 0.57 | 100 | 3.39E−04 | −1.85 | 3.6 |
| | 28_st1 | | | | | | | | | | | | | | | | | | | | | |
| hsa-miR- | hsa- | 6.13 | 6.90 | 7.00 | 6.68 | 0.48 | 100 | 5.94 | 5.23 | 4.02 | 6.58 | 5.46 | 4.24 | 5.64 | 3.07 | 3.53 | 4.86 | 1.19 | 44 | 3.04E−02 | −1.82 | 3.5 |
| 365 | cand708_st1 | | | | | | | | | | | | | | | | | | | | | |
| hsa-asg- | hsa-asg- | 6.72 | 7.05 | 6.66 | 6.81 | 0.21 | 100 | 4.71 | 6.29 | 6.06 | 5.88 | 5.25 | 5.56 | 4.44 | 2.27 | 4.47 | 4.99 | 1.23 | 11 | 3.29E−02 | −1.82 | 3.5 |
| 2924 | 2924_st1 | | | | | | | | | | | | | | | | | | | | | |
| hsa-miR- | hsa-miR- | 10.7 | 10.8 | 11.4 | 11.03 | 0.37 | 100 | 10.0 | 9.44 | 9.16 | 9.78 | 9.72 | 7.50 | 8.94 | 8.77 | 9.53 | 9.21 | 0.76 | 100 | 3.05E−03 | −1.82 | 3.5 |
| 29c | 29c_st2 | | | | | | | | | | | | | | | | | | | | | |
| hsa-asg- | hsa-asg- | 5.49 | 5.73 | 6.14 | 5.79 | 0.33 | 100 | 5.03 | 3.74 | 4.30 | 4.99 | 4.65 | 2.53 | 3.40 | 3.32 | 3.87 | 3.98 | 0.84 | 0 | 5.33E−03 | −1.81 | 3.5 |
| 11756 | 11756_st1 | | | | | | | | | | | | | | | | | | | | | |
| hsa-miR-197 | hsa-miR-197_st1 | 10.6 | 11.0 | 11.1 | 10.93 | 0.29 | 100 | 10.2 | 8.61 | 9.99 | 9.95 | 9.07 | 8.06 | 9.21 | 8.52 | 8.59 | 9.13 | 0.76 | 100 | 3.08E−03 | −1.80 | 3.5 |
| hsa-miR- | hsa-miR- | 10.8 | 11.2 | 11.3 | 11.14 | 0.28 | 100 | 10.7 | 9.36 | 9.71 | 9.95 | 8.86 | 8.99 | 9.01 | 8.77 | 8.68 | 9.35 | 0.69 | 100 | 1.61E−03 | −1.80 | 3.5 |
| 128a | 128a_st2 | | | | | | | | | | | | | | | | | | | | | |
| hsa-miR- | hsa-miR- | 7.91 | 7.05 | 7.34 | 7.43 | 0.43 | 100 | 5.14 | 5.04 | 6.67 | 6.09 | 6.11 | 5.17 | 5.92 | 5.45 | 5.27 | 5.65 | 0.57 | 44 | 6.00E−04 | −1.78 | 3.4 |
| 409-5p | 409-5p_st1 | | | | | | | | | | | | | | | | | | | | | |
| hsa-miR- | hsa-miR- | 11.3 | 11.5 | 11.6 | 11.51 | 0.16 | 100 | 11.2 | 9.83 | 10.0 | 10.3 | 9.19 | 9.33 | 9.54 | 9.19 | 9.25 | 9.77 | 0.69 | 100 | 1.86E−03 | −1.74 | 3.3 |
| 128b | 128b_st1 | | | | | | | | | | | | | | | | | | | | | |
| hsa-asg- | hsa-asg- | 7.40 | 8.27 | 7.24 | 7.64 | 0.55 | 100 | 6.16 | 6.49 | 6.21 | 6.31 | 4.24 | 7.42 | 5.73 | 4.83 | 5.75 | 5.90 | 0.93 | 78 | 1.36E−02 | −1.73 | 3.3 |
| 1519 | 1519_st1 | | | | | | | | | | | | | | | | | | | | | |
| hsa-asg- | hsa-asg- | 6.91 | 6.63 | 6.81 | 6.78 | 0.14 | 100 | 5.48 | 5.06 | 4.96 | 6.07 | 5.36 | 4.52 | 5.05 | 3.78 | 5.20 | 5.05 | 0.64 | 11 | 1.08E−03 | −1.73 | 3.3 |
| 5715 | 5715_st2 | | | | | | | | | | | | | | | | | | | | | |
| hsa-asg- | hsa-asg- | 5.05 | 5.68 | 6.17 | 5.63 | 0.56 | 67 | 4.24 | 3.64 | 4.12 | 4.26 | 4.33 | 3.95 | 3.50 | 3.74 | 3.39 | 3.91 | 0.35 | 0 | 7.72E−05 | −1.73 | 3.3 |
| 6543 | 6543_st1 | | | | | | | | | | | | | | | | | | | | | |
| hsa-asg- | hsa-asg- | 4.81 | 4.89 | 5.38 | 5.03 | 0.31 | 33 | 4.43 | 2.87 | 3.91 | 4.00 | 3.54 | 2.85 | 3.05 | 2.62 | 2.54 | 3.31 | 0.68 | 0 | 2.04E−03 | −1.72 | 3.3 |
| 7745 | 7745_st2 | | | | | | | | | | | | | | | | | | | | | |
| hsa-miR- | hsa-asg- | 6.60 | 5.85 | 6.43 | 6.29 | 0.39 | 100 | 3.21 | 6.25 | 5.09 | 4.52 | 4.45 | 5.20 | 4.59 | 4.21 | 3.65 | 4.58 | 0.89 | 11 | 1.03E−02 | −1.72 | 3.3 |
| 654 | 33_st1 | | | | | | | | | | | | | | | | | | | | | |
| hsa-asg- | hsa-asg- | 6.52 | 5.68 | 6.68 | 6.29 | 0.54 | 100 | 5.45 | 4.66 | 5.77 | 5.17 | 4.47 | 3.43 | 3.85 | 3.99 | 4.54 | 4.59 | 0.77 | 11 | 5.78E−03 | −1.70 | 3.2 |
| 1536 | 1536_st2 | | | | | | | | | | | | | | | | | | | | | |
| hsa-asg- | hsa-asg- | 7.77 | 8.03 | 8.60 | 8.13 | 0.42 | 100 | 7.09 | 6.49 | 6.38 | 6.53 | 6.50 | 6.52 | 6.07 | 6.50 | 5.93 | 6.45 | 0.33 | 100 | 2.70E−05 | −1.69 | 3.2 |
| 4637 | 4637_st1 | | | | | | | | | | | | | | | | | | | | | |
| hsa-asg- | hsa-asg- | 5.76 | 4.71 | 4.39 | 4.95 | 0.71 | 33 | 2.78 | 3.42 | 3.23 | 2.69 | 3.89 | 3.95 | 3.29 | 3.32 | 2.92 | 3.28 | 0.44 | 0 | 5.90E−04 | −1.68 | 3.2 |
| 8486 | 8486_st2 | | | | | | | | | | | | | | | | | | | | | |
| Has- | hsa- | 9.71 | 10.2 | 10.6 | 10.19 | 0.46 | 100 | 9.47 | 8.16 | 9.72 | 9.39 | 8.42 | 7.95 | 8.50 | 7.61 | 7.41 | 8.51 | 0.84 | 100 | 9.12E−03 | −1.67 | 3.2 |
| miR157 | miR157_st2 | | | | | | | | | | | | | | | | | | | | | |
| hsa-asg- | hsa-asg- | 5.30 | 5.40 | 5.20 | 5.30 | 0.10 | 67 | 4.71 | 4.16 | 4.54 | 3.63 | 3.44 | 3.59 | 3.40 | 2.27 | 2.92 | 3.63 | 0.77 | 0 | 4.54E−03 | −1.67 | 3.2 |
| 2299 | 2299_st1 | | | | | | | | | | | | | | | | | | | | | |
| hsa-asg- | hsa-asg- | 7.23 | 8.10 | 7.99 | 7.77 | 0.48 | 100 | 5.70 | 7.71 | 5.43 | 5.08 | 6.59 | 7.81 | 5.16 | 6.08 | 5.71 | 6.14 | 1.03 | 44 | 2.64E−02 | −1.63 | 3.1 |
| 4912 | 4912_st2 | | | | | | | | | | | | | | | | | | | | | |
| hsa-asg- | hsa-asg- | 5.53 | 5.92 | 6.08 | 5.84 | 0.28 | 100 | 5.32 | 4.16 | 4.12 | 4.49 | 4.00 | 3.87 | 4.14 | 3.44 | 4.32 | 4.21 | 0.51 | 11 | 4.30E−04 | −1.63 | 3.1 |
| 13905 | 13905_st1 | | | | | | | | | | | | | | | | | | | | | |
| hsa-miR- | hsa-asg- | 7.84 | 8.15 | 8.27 | 8.09 | 0.22 | 100 | 7.53 | 5.85 | 7.37 | 7.77 | 6.85 | 4.77 | 6.64 | 5.46 | 5.93 | 6.47 | 1.02 | 56 | 2.46E−02 | −1.62 | 3.1 |
| 331 | 14205_st1 | | | | | | | | | | | | | | | | | | | | | |
| hsa-miR- | hsa-miR- | 9.34 | 9.56 | 9.52 | 9.48 | 0.12 | 100 | 9.04 | 7.57 | 8.35 | 8.79 | 7.69 | 7.09 | 7.70 | 7.28 | 7.20 | 7.86 | 0.71 | 100 | 3.34E−03 | −1.62 | 3.1 |
| 331 | 331_st2 | | | | | | | | | | | | | | | | | | | | | |
| hsa-asg- | hsa-asg- | 5.79 | 5.68 | 6.12 | 5.86 | 0.23 | 100 | 4.61 | 5.08 | 4.30 | 4.55 | 5.12 | 4.55 | 3.29 | 2.45 | 4.32 | 4.25 | 0.86 | 11 | 1.10E−02 | −1.61 | 3.1 |
| 522 | 522_st1 | | | | | | | | | | | | | | | | | | | | | |
| hsa-miR- | hsa-miR- | 11.9 | 12.1 | 12.3 | 12.12 | 0.20 | 100 | 11.2 | 10.4 | 10.9 | 10.8 | 9.83 | 10.3 | 10.2 | 10.4 | 10.1 | 10.5 | 0.44 | 100 | 1.35E−04 | −1.61 | 3.0 |
| 181b | 181b_st2 | | | | | | | | | | | | | | | | | | | | | |
| hsa-miR- | hsa-miR- | 2.27 | 4.80 | 5.87 | 4.31 | 1.85 | 33 | 2.61 | 2.36 | 3.39 | 1.93 | 2.37 | 3.37 | 2.15 | 3.32 | 2.92 | 2.71 | 0.56 | 0 | 3.25E−02 | −1.60 | 3.0 |
| 137 | 137_st1 | | | | | | | | | | | | | | | | | | | | | |
| hsa-miR-92 | hsa- | 14.0 | 13.9 | 14.2 | 14.07 | 0.17 | 100 | 13.5 | 11.9 | 13.1 | 12.9 | 12.2 | 11.2 | 12.7 | 12.4 | 12.1 | 12.4 | 0.69 | 100 | 3.33E−03 | −1.59 | 3.0 |
| | cand342_st1 | | | | | | | | | | | | | | | | | | | | | |
| hsa-miR-92 | hsa-miR- | 13.9 | 13.8 | 14.1 | 13.98 | 0.12 | 100 | 13.5 | 12.0 | 13.0 | 12.9 | 12.2 | 11.1 | 12.7 | 12.4 | 12.1 | 12.4 | 0.68 | 100 | 3.98E−03 | −1.52 | 2.9 |
| | 92_st1 | | | | | | | | | | | | | | | | | | | | | |
| hsa-asg- | hsa-asg- | 6.69 | 6.66 | 6.11 | 6.49 | 0.33 | 67 | 5.78 | 4.58 | 5.35 | 5.50 | 4.91 | 5.32 | 4.14 | 3.95 | 4.57 | 4.90 | 0.63 | 0 | 2.21E−03 | −1.59 | 3.0 |
| 14138 | 14138_st2 | | | | | | | | | | | | | | | | | | | | | |
| hsa-asg- | hsa-asg- | 7.25 | 7.39 | 7.13 | 7.26 | 0.13 | 100 | 5.60 | 5.72 | 5.67 | 6.74 | 5.70 | 5.30 | 5.25 | 5.00 | 6.09 | 5.68 | 0.51 | 56 | 4.37E−04 | −1.58 | 3.0 |
| 7471 | 7471_st1 | | | | | | | | | | | | | | | | | | | | | |
| hsa-asg- | hsa-asg- | 6.95 | 6.78 | 7.29 | 7.01 | 0.26 | 100 | 6.52 | 4.30 | 6.11 | 5.93 | 5.24 | 4.37 | 5.86 | 5.62 | 5.00 | 5.44 | 0.77 | 33 | 7.07E−03 | −1.57 | 3.0 |
| 9719 | 9719_st1 | | | | | | | | | | | | | | | | | | | | | |
| hsa-let-7e | hsa-let- | 13.9 | 13.7 | 13.9 | 13.85 | 0.13 | 100 | 12.6 | 12.8 | 12.3 | 12.6 | 12.3 | 12.6 | 12.0 | 11.3 | 11.8 | 12.2 | 0.48 | 100 | 3.17E−04 | −1.56 | 2.9 |
| | 7e_st1 | | | | | | | | | | | | | | | | | | | | | |
| hsa-asg- | hsa-asg- | 6.44 | 6.10 | 6.35 | 6.30 | 0.18 | 100 | 6.30 | 5.78 | 4.26 | 4.26 | 5.12 | 5.09 | 4.54 | 4.25 | 3.32 | 4.77 | 0.90 | 22 | 1.82E−02 | −1.53 | 2.9 |
| 8902 | 8902_st2 | | | | | | | | | | | | | | | | | | | | | |
| hsa-asg- | hsa-asg- | 8.15 | 8.03 | 8.66 | 8.28 | 0.34 | 100 | 7.26 | 7.04 | 6.40 | 7.06 | 7.11 | 6.98 | 6.41 | 6.29 | 6.21 | 6.75 | 0.41 | 89 | 1.92E−04 | −1.53 | 2.9 |
| 6951 | 6951_st2 | | | | | | | | | | | | | | | | | | | | | |
| hsa-asg- | hsa-asg- | 6.48 | 5.85 | 6.33 | 6.22 | 0.33 | 100 | 5.18 | 4.86 | 4.54 | 4.81 | 5.95 | 4.43 | 3.93 | 4.35 | 4.32 | 4.71 | 0.59 | 22 | 2.04E−03 | −1.51 | 2.9 |
| 2967 | 2967_st2 | | | | | | | | | | | | | | | | | | | | | |
| hsa-asg- | hsa-asg- | 7.74 | 7.16 | 7.72 | 7.54 | 0.33 | 100 | 6.89 | 6.98 | 5.06 | 5.95 | 6.49 | 7.01 | 4.94 | 6.34 | 4.57 | 6.03 | 0.95 | 67 | 2.49E−02 | −1.51 | 2.8 |
| 6277 | 6277_st2 | | | | | | | | | | | | | | | | | | | | | |
| hsa-asg- | hsa-asg- | 11.2 | 11.6 | 11.7 | 11.55 | 0.26 | 100 | 10.7 | 9.86 | 10.9 | 10.8 | 10.0 | 9.60 | 10.2 | 9.08 | 9.16 | 10.0 | 0.70 | 100 | 5.46E−03 | −1.50 | 2.8 |
| 562 | 562_st1 | | | | | | | | | | | | | | | | | | | | | |
| hsa-asg- | hsa-asg- | 5.84 | 6.12 | 5.87 | 5.94 | 0.15 | 100 | 4.90 | 4.08 | 4.75 | 5.12 | 5.01 | 4.31 | 3.59 | 4.14 | 4.24 | 4.46 | 0.51 | 0 | 6.89E−04 | −1.48 | 2.8 |
| 1565 | 1565_st2 | | | | | | | | | | | | | | | | | | | | | |
| hsa-asg- | hsa-asg- | 8.12 | 7.85 | 8.52 | 8.16 | 0.33 | 100 | 7.33 | 7.11 | 5.45 | 7.16 | 6.78 | 6.86 | 6.78 | 6.84 | 5.84 | 6.68 | 0.63 | 33 | 3.39E−03 | −1.48 | 2.8 |
| 872 | 872_st2 | | | | | | | | | | | | | | | | | | | | | |
| hsa-asg- | hsa-asg- | 5.02 | 4.98 | 5.35 | 5.12 | 0.20 | 33 | 4.37 | 3.53 | 4.39 | 3.40 | 4.11 | 2.85 | 2.64 | 3.83 | 3.65 | 3.64 | 0.62 | 0 | 2.69E−03 | −1.48 | 2.8 |
| 2286 | 2286_st2 | | | | | | | | | | | | | | | | | | | | | |
| hsa-asg- | hsa-asg- | 6.01 | 5.76 | 5.94 | 5.90 | 0.13 | 33 | 5.11 | 5.32 | 5.30 | 5.02 | 5.43 | 4.55 | 3.59 | 2.70 | 2.83 | 4.43 | 1.10 | 0 | 4.80E−02 | −1.47 | 2.8 |
| 14015 | 14015_st1 | | | | | | | | | | | | | | | | | | | | | |
| hsa-asg- | hsa-asg- | 9.20 | 7.89 | 8.90 | 8.66 | 0.68 | 100 | 7.86 | 8.02 | 6.90 | 6.99 | 7.42 | 7.88 | 6.22 | 7.07 | 6.36 | 7.19 | 0.66 | 89 | 7.48E−03 | −1.47 | 2.8 |
| 8872 | 8872_st1 | | | | | | | | | | | | | | | | | | | | | |
| hsa-asg- | hsa-asg- | 6.92 | 6.75 | 7.43 | 7.03 | 0.35 | 100 | 5.68 | 5.25 | 6.12 | 6.30 | 5.59 | 5.60 | 5.35 | 5.06 | 5.20 | 5.57 | 0.42 | 11 | 3.12E−04 | −1.46 | 2.8 |
| 11181 | 11181_st1 | | | | | | | | | | | | | | | | | | | | | |
| hsa-miR- | hsa-miR- | 13.1 | 13.3 | 13.4 | 13.32 | 0.12 | 100 | 12.2 | 11.8 | 11.9 | 12.6 | 12.2 | 11.4 | 11.7 | 10.9 | 11.7 | 11.8 | 0.50 | 100 | 7.12E−04 | −1.44 | 2.7 |
| 99a | 99a_st2 | | | | | | | | | | | | | | | | | | | | | |
| hsa-miR- | hsa- | 13.0 | 13.2 | 13.2 | 13.16 | 0.08 | 100 | 12.5 | 11.7 | 12.2 | 12.8 | 12.4 | 11.5 | 11.8 | 11.1 | 11.6 | 11.9 | 0.56 | 100 | 5.64E−03 | −1.16 | 2.2 |
| 99a | cand160_st2 | | | | | | | | | | | | | | | | | | | | | |
| hsa-asg- | hsa-asg- | 5.28 | 6.17 | 6.46 | 5.97 | 0.62 | 67 | 5.70 | 4.91 | 4.54 | 5.28 | 4.39 | 4.97 | 4.44 | 2.78 | 3.77 | 4.53 | 0.86 | 11 | 2.51E−02 | −1.44 | 2.7 |
| 1177 | 1177_st2 | | | | | | | | | | | | | | | | | | | | | |
| hsa-asg- | hsa-asg- | 5.07 | 5.83 | 4.52 | 5.14 | 0.66 | 33 | 4.17 | 2.87 | 3.39 | 4.55 | 4.39 | 2.69 | 4.14 | 2.93 | 4.32 | 3.72 | 0.74 | 0 | 1.46E−02 | −1.42 | 2.7 |
| 6758 | 6758_st1 | | | | | | | | | | | | | | | | | | | | | |
| hsa-miR- | hsa-miR- | 7.86 | 7.86 | 7.58 | 7.77 | 0.16 | 100 | 6.98 | 5.77 | 6.79 | 7.12 | 6.21 | 4.65 | 6.35 | 6.03 | 7.18 | 6.34 | 0.81 | 89 | 1.49E−02 | −1.42 | 2.7 |
| 17-3p | 17-3p_st1 | | | | | | | | | | | | | | | | | | | | | |
| hsa-asg- | hsa-asg- | 6.91 | 7.06 | 7.30 | 7.09 | 0.20 | 100 | 5.85 | 5.84 | 5.45 | 5.90 | 5.92 | 6.00 | 5.40 | 5.15 | 5.63 | 5.68 | 0.29 | 44 | 1.61E−05 | −1.41 | 2.7 |
| 3038 | 3038_st2 | | | | | | | | | | | | | | | | | | | | | |
| hsa-miR- | hsa-miR- | 10.6 | 10.5 | 9.84 | 10.35 | 0.44 | 100 | 8.04 | 9.33 | 9.47 | 9.54 | 8.91 | 9.18 | 8.03 | 8.82 | 9.17 | 8.94 | 0.57 | 100 | 3.04E−03 | −1.41 | 2.7 |
| 34a | 34a_st1 | | | | | | | | | | | | | | | | | | | | | |
| hsa-asg- | hsa-asg- | 5.30 | 5.78 | 5.31 | 5.46 | 0.27 | 33 | 4.61 | 3.42 | 4.87 | 4.49 | 3.54 | 2.99 | 4.82 | 4.68 | 3.09 | 4.06 | 0.78 | 0 | 1.38E−02 | −1.41 | 2.6 |
| 12840 | 12840_st1 | | | | | | | | | | | | | | | | | | | | | |
| hsa-asg- | hsa-asg- | 5.63 | 5.87 | 5.90 | 5.80 | 0.15 | 100 | 5.57 | 4.16 | 4.93 | 4.91 | 4.42 | 2.99 | 5.05 | 3.32 | 4.32 | 4.41 | 0.83 | 11 | 1.89E−02 | −1.39 | 2.6 |
| 1766 | 1766_st2 | | | | | | | | | | | | | | | | | | | | | |
| hsa-asg- | hsa-asg- | 6.24 | 6.06 | 6.34 | 6.21 | 0.14 | 33 | 5.60 | 5.83 | 4.58 | 4.66 | 5.39 | 4.91 | 3.68 | 4.85 | 3.92 | 4.82 | 0.72 | 0 | 9.11E−03 | −1.39 | 2.6 |
| 2315 | 2315_st2 | | | | | | | | | | | | | | | | | | | | | |
| hsa-asg- | hsa-asg- | 6.01 | 6.06 | 6.33 | 6.13 | 0.17 | 100 | 5.73 | 5.33 | 4.39 | 5.27 | 5.29 | 4.75 | 4.73 | 3.83 | 3.53 | 4.76 | 0.74 | 33 | 1.11E−02 | −1.37 | 2.6 |
| 7319 | 7319_st2 | | | | | | | | | | | | | | | | | | | | | |
| hsa-miR- | hsa-miR- | 10.8 | 11.2 | 11.0 | 11.03 | 0.19 | 100 | 10.8 | 9.87 | 10.1 | 10.0 | 9.58 | 8.72 | 9.33 | 8.80 | 9.65 | 9.66 | 0.66 | 100 | 6.36E−03 | −1.37 | 2.6 |
| 192 | 192_st2 | | | | | | | | | | | | | | | | | | | | | |
| hsa- | hsa- | 7.97 | 6.96 | 7.46 | 7.47 | 0.51 | 100 | 6.75 | 7.27 | 5.91 | 5.65 | 6.24 | 6.29 | 5.05 | 6.14 | 5.58 | 6.10 | 0.66 | 56 | 8.67E−03 | −1.37 | 2.6 |
| cand173 | cand173_st1 | | | | | | | | | | | | | | | | | | | | | |
| hsa-asg- | hsa-asg- | 5.71 | 5.06 | 5.50 | 5.42 | 0.33 | 33 | 5.22 | 3.29 | 4.54 | 4.40 | 4.27 | 2.69 | 4.00 | 3.83 | 4.32 | 4.06 | 0.73 | 0 | 1.27E−02 | −1.36 | 2.6 |
| 5545 | 5545_st2 | | | | | | | | | | | | | | | | | | | | | |
| hsa-miR- | hsa-miR- | 10.6 | 11.0 | 11.0 | 10.92 | 0.22 | 100 | 10.4 | 9.64 | 9.71 | 10.5 | 9.81 | 9.23 | 9.23 | 8.15 | 9.50 | 9.58 | 0.70 | 100 | 9.87E−03 | −1.34 | 2.5 |
| 30e-5p | 30e-5p_st2 | | | | | | | | | | | | | | | | | | | | | |
| hsa-asg- | hsa-asg- | 5.76 | 5.60 | 4.25 | 5.20 | 0.83 | 67 | 4.17 | 3.16 | 3.91 | 4.08 | 4.89 | 2.69 | 3.05 | 4.41 | 4.40 | 3.86 | 0.73 | 0 | 2.34E−02 | −1.34 | 2.5 |
| 12240 | 12240_st1 | | | | | | | | | | | | | | | | | | | | | |
| hsa-asg- | hsa-asg- | 5.38 | 5.76 | 4.85 | 5.33 | 0.45 | 33 | 4.17 | 3.42 | 3.91 | 5.56 | 4.58 | 4.18 | 2.78 | 2.93 | 4.54 | 4.01 | 0.87 | 0 | 3.36E−02 | −1.32 | 2.5 |
| 8380 | 8380_st2 | | | | | | | | | | | | | | | | | | | | | |
| hsa-miR- | hsa-miR- | 12.9 | 13.1 | 13.2 | 13.12 | 0.12 | 100 | 12.5 | 12.3 | 11.2 | 12.3 | 12.1 | 12.2 | 11.7 | 10.7 | 10.8 | 11.8 | 0.70 | 100 | 1.02E−02 | −1.32 | 2.5 |
| 10b | 10b_st2 | | | | | | | | | | | | | | | | | | | | | |
| hsa-miR- | hsa-miR- | 10.8 | 10.6 | 10.8 | 10.79 | 0.09 | 100 | 9.91 | 9.64 | 10.0 | 10.0 | 9.43 | 8.17 | 9.21 | 9.10 | 9.76 | 9.48 | 0.59 | 100 | 4.14E−03 | −1.31 | 2.5 |
| 106b | 106b_st2 | | | | | | | | | | | | | | | | | | | | | |
| hsa-miR- | hsa-miR- | 12.6 | 12.8 | 12.8 | 12.77 | 0.09 | 100 | 11.7 | 11.6 | 11.2 | 12.0 | 11.7 | 11.7 | 11.1 | 10.9 | 11.1 | 11.4 | 0.37 | 100 | 1.76E−04 | −1.29 | 2.4 |
| 361 | 361_st2 | | | | | | | | | | | | | | | | | | | | | |
| hsa-miR- | hsa-miR- | 13.4 | 13.4 | 13.6 | 13.50 | 0.11 | 100 | 13.1 | 12.2 | 12.2 | 13.1 | 12.6 | 11.8 | 11.7 | 11.1 | 11.9 | 12.2 | 0.65 | 100 | 8.12E−03 | −1.28 | 2.4 |
| 100 | 100_st2 | | | | | | | | | | | | | | | | | | | | | |
| hsa-miR- | hsa- | 13.0 | 13.2 | 13.2 | 13.19 | 0.11 | 100 | 13.0 | 12.1 | 12.3 | 12.8 | 12.5 | 11.7 | 11.6 | 11.2 | 11.9 | 12.1 | 0.58 | 100 | 1.46E−02 | −1.02 | 2.0 |
| 100 | cand375_st1 | | | | | | | | | | | | | | | | | | | | | |
| hsa- | hsa- | 9.71 | 10.3 | 10.2 | 10.11 | 0.36 | 100 | 9.62 | 9.10 | 9.23 | 9.55 | 8.87 | 8.54 | 8.50 | 8.15 | 7.91 | 8.83 | 0.60 | 100 | 6.33E−03 | −1.28 | 2.4 |
| miR257 | miR257_st1 | | | | | | | | | | | | | | | | | | | | | |
| hsa-asg- | hsa-asg- | 6.84 | 7.38 | 8.30 | 7.51 | 0.73 | 100 | 6.32 | 7.09 | 6.03 | 6.08 | 6.14 | 6.40 | 5.69 | 6.03 | 6.41 | 6.24 | 0.39 | 78 | 2.69E−03 | −1.26 | 2.4 |
| 11938 | 11938_st1 | | | | | | | | | | | | | | | | | | | | | |
| hsa-miR- | hsa-miR- | 7.49 | 8.04 | 7.07 | 7.53 | 0.48 | 100 | 6.59 | 6.67 | 6.42 | 6.87 | 6.43 | 6.02 | 5.86 | 6.26 | 5.29 | 6.27 | 0.48 | 89 | 2.88E−03 | −1.26 | 2.4 |
| 425-3p | 425_st2 | | | | | | | | | | | | | | | | | | | | | |
| hsa-asg- | hsa-asg- | 6.44 | 6.62 | 6.95 | 6.67 | 0.26 | 100 | 5.48 | 5.82 | 5.41 | 6.09 | 5.69 | 4.75 | 5.22 | 4.83 | 5.42 | 5.41 | 0.44 | 44 | 9.16E−04 | −1.26 | 2.4 |
| 6462 | 6462_st1 | | | | | | | | | | | | | | | | | | | | | |
| hsa-asg- | hsa-asg- | 9.84 | 9.93 | 10.0 | 9.94 | 0.11 | 100 | 9.39 | 10.1 | 8.17 | 8.70 | 8.96 | 9.66 | 7.51 | 7.93 | 7.66 | 8.69 | 0.94 | 44 | 4.83E−02 | −1.26 | 2.4 |
| 8542 | 8542_st2 | | | | | | | | | | | | | | | | | | | | | |
| hsa-asg- | hsa-asg- | 6.61 | 6.31 | 6.23 | 6.38 | 0.20 | 100 | 5.73 | 5.79 | 4.81 | 5.32 | 5.53 | 5.17 | 4.64 | 4.28 | 4.89 | 5.13 | 0.51 | 22 | 2.44E−03 | −1.25 | 2.4 |
| 5740 | 5740_st2 | | | | | | | | | | | | | | | | | | | | | |
| hsa-miR- | hsa-miR- | 13.4 | 13.5 | 13.6 | 13.54 | 0.07 | 100 | 12.5 | 12.3 | 12.0 | 13.2 | 12.8 | 11.9 | 11.9 | 11.0 | 12.5 | 12.2 | 0.64 | 100 | 8.37E−03 | −1.25 | 2.4 |
| 27b | 27b_st1 | | | | | | | | | | | | | | | | | | | | | |
| hsa-miR- | hsa-miR- | 13.0 | 13.1 | 13.3 | 13.18 | 0.14 | 100 | 12.7 | 11.4 | 12.2 | 12.7 | 12.4 | 10.8 | 12.0 | 11.3 | 11.5 | 11.9 | 0.68 | 100 | 1.21E−02 | −1.25 | 2.4 |
| 125a | 125a_st2 | | | | | | | | | | | | | | | | | | | | | |
| hsa-asg- | hsa-asg- | 11.1 | 9.89 | 10.7 | 10.60 | 0.66 | 100 | 10.1 | 10.1 | 8.97 | 9.23 | 9.89 | 9.97 | 8.64 | 9.33 | 7.88 | 9.36 | 0.78 | 89 | 3.40E−02 | −1.24 | 2.4 |
| 9092 | 9092_st2 | | | | | | | | | | | | | | | | | | | | | |
| hsa-miR- | hsa-miR- | 6.48 | 7.07 | 6.50 | 6.68 | 0.34 | 100 | 4.76 | 5.12 | 6.41 | 6.24 | 5.05 | 5.24 | 4.73 | 5.11 | 6.41 | 5.45 | 0.70 | 56 | 1.62E−02 | −1.23 | 2.4 |
| 34b | 34b_st2 | | | | | | | | | | | | | | | | | | | | | |
| hsa-asg- | hsa-asg- | 6.17 | 6.02 | 6.28 | 6.16 | 0.13 | 100 | 6.00 | 5.37 | 4.61 | 5.17 | 5.62 | 5.35 | 5.16 | 3.64 | 3.39 | 4.92 | 0.88 | 11 | 4.15E−02 | −1.23 | 2.3 |
| 6287 | 6287_st2 | | | | | | | | | | | | | | | | | | | | | |
| hsa-asg- | hsa-asg- | 7.67 | 7.40 | 7.61 | 7.56 | 0.14 | 100 | 7.36 | 6.37 | 6.19 | 6.97 | 6.35 | 5.27 | 5.82 | 5.74 | 6.88 | 6.33 | 0.66 | 89 | 1.14E−02 | −1.23 | 2.3 |
| 925 | 925_st1 | | | | | | | | | | | | | | | | | | | | | |
| hsa-asg- | hsa-asg- | 5.34 | 5.87 | 5.24 | 5.48 | 0.34 | 67 | 3.85 | 4.08 | 3.91 | 5.75 | 4.91 | 4.24 | 4.73 | 3.07 | 3.77 | 4.26 | 0.78 | 11 | 2.75E−02 | −1.23 | 2.3 |
| 2596 | 2596_st2 | | | | | | | | | | | | | | | | | | | | | |
| hsa-miR- | hsa-miR- | 12.4 | 12.4 | 12.4 | 12.42 | 0.02 | 100 | 12.0 | 11.7 | 10.9 | 12.2 | 11.6 | 11.1 | 10.8 | 9.75 | 10.5 | 11.2 | 0.79 | 100 | 2.70E−02 | −1.22 | 2.3 |
| 152 | 152_st1 | | | | | | | | | | | | | | | | | | | | | |
| hsa-asg- | hsa-asg- | 5.76 | 6.00 | 6.08 | 5.94 | 0.17 | 100 | 5.75 | 4.30 | 4.47 | 5.34 | 5.12 | 3.95 | 4.94 | 4.47 | 4.24 | 4.73 | 0.59 | 11 | 6.55E−03 | −1.21 | 2.3 |
| 10081 | 10081_st1 | | | | | | | | | | | | | | | | | | | | | |
| hsa-asg- | hsa-asg- | 7.42 | 6.91 | 7.45 | 7.26 | 0.30 | 0 | 5.60 | 6.42 | 6.43 | 6.33 | 5.78 | 6.22 | 6.76 | 5.42 | 5.63 | 6.06 | 0.47 | 11 | 2.17E−03 | −1.20 | 2.3 |
| 8476 | 8476_st1 | | | | | | | | | | | | | | | | | | | | | |
| hsa-asg- | hsa-asg- | 5.76 | 5.96 | 5.85 | 5.85 | 0.10 | 100 | 5.70 | 4.30 | 5.67 | 5.43 | 4.11 | 3.59 | 4.27 | 4.28 | 4.84 | 4.69 | 0.76 | 22 | 2.79E−02 | −1.17 | 2.2 |
| 10465 | 10465_st2 | | | | | | | | | | | | | | | | | | | | | |
| hsa-asg- | hsa-asg- | 7.28 | 7.97 | 8.44 | 7.90 | 0.58 | 100 | 7.02 | 6.32 | 6.72 | 7.46 | 6.95 | 6.64 | 6.46 | 6.23 | 6.78 | 6.73 | 0.38 | 100 | 2.26E−03 | −1.16 | 2.2 |
| 2301 | 2301_st2 | | | | | | | | | | | | | | | | | | | | | |
| hsa-miR- | hsa-miR- | 13.2 | 13.3 | 13.4 | 13.32 | 0.09 | 100 | 12.8 | 12.1 | 12.4 | 12.7 | 12.4 | 11.6 | 11.9 | 11.3 | 11.9 | 12.1 | 0.49 | 100 | 2.78E−03 | −1.15 | 2.2 |
| 125b | 125b_st1 | | | | | | | | | | | | | | | | | | | | | |
| hsa-miR- | hsa-miR- | 7.51 | 7.47 | 7.09 | 7.36 | 0.23 | 100 | 7.35 | 6.80 | 6.01 | 7.48 | 6.36 | 5.50 | 5.73 | 5.42 | 5.23 | 6.21 | 0.84 | 56 | 4.61E−02 | −1.15 | 2.2 |
| 489 | 489_st2 | | | | | | | | | | | | | | | | | | | | | |
| hsa-asg- | hsa-asg- | 5.30 | 5.13 | 4.52 | 4.98 | 0.41 | 33 | 4.99 | 3.02 | 3.67 | 4.95 | 4.04 | 3.59 | 3.05 | 3.32 | 3.87 | 3.83 | 0.73 | 0 | 2.88E−02 | −1.15 | 2.2 |
| 187 | 187_st1 | | | | | | | | | | | | | | | | | | | | | |
| hsa-asg- | hsa-asg- | 10.5 | 10.4 | 10.6 | 10.57 | 0.09 | 100 | 10.5 | 9.46 | 9.58 | 9.81 | 9.17 | 8.63 | 9.51 | 8.96 | 9.11 | 9.43 | 0.56 | 100 | 6.85E−03 | −1.14 | 2.2 |
| 13308 | 13308_st2 | | | | | | | | | | | | | | | | | | | | | |
| hsa-miR-628 | hsa-miR-628_st2 | 8.56 | 8.85 | 8.85 | 8.75 | 0.17 | 100 | 8.30 | 7.88 | 7.20 | 8.00 | 7.35 | 7.52 | 7.24 | 7.66 | 7.44 | 7.62 | 0.37 | 100 | 5.65E−04 | −1.13 | 2.2 |
| hsa-asg- | hsa-asg- | 5.53 | 5.95 | 5.92 | 5.80 | 0.24 | 100 | 5.32 | 5.04 | 5.04 | 4.93 | 4.42 | 3.87 | 3.93 | 4.44 | 5.09 | 4.67 | 0.53 | 33 | 6.03E−03 | −1.12 | 2.2 |
| 317 | 317_st2 | | | | | | | | | | | | | | | | | | | | | |
| hsa-miR- | hsa-miR- | 7.43 | 6.75 | 6.89 | 7.02 | 0.36 | 100 | 6.73 | 6.17 | 5.12 | 5.83 | 6.14 | 6.15 | 5.56 | 6.04 | 5.44 | 5.91 | 0.48 | 56 | 4.51E−03 | −1.11 | 2.2 |
| 566 | 566_st1 | | | | | | | | | | | | | | | | | | | | | |
| hsa-asg- | hsa-asg- | 5.84 | 5.46 | 5.85 | 5.72 | 0.22 | 67 | 4.31 | 4.71 | 4.87 | 4.81 | 4.30 | 4.65 | 4.73 | 4.28 | 4.78 | 4.61 | 0.24 | 0 | 3.49E−05 | −1.11 | 2.2 |
| 6770_st1 | 6770_st1 | | | | | | | | | | | | | | | | | | | | | |
| hsa-asg-10401 | hsa-asg-10401_st1 | 5.60 | 5.34 | 5.48 | 5.47 | 0.13 | 67 | 5.11 | 5.04 | 3.91 | 5.04 | 4.24 | 4.55 | 4.20 | 4.07 | 3.09 | 4.36 | 0.65 | 22 | 1.78E−02 | −1.11 | 2.2 |
| hsa-asg- | hsa-asg- | 7.53 | 7.20 | 7.51 | 7.41 | 0.18 | 100 | 6.96 | 7.18 | 5.74 | 6.27 | 6.67 | 6.52 | 5.54 | 6.57 | 5.35 | 6.31 | 0.64 | 67 | 1.70E−02 | −1.10 | 2.1 |
| 5326 | 5326_st2 | | | | | | | | | | | | | | | | | | | | | |
| hsa-asg-4448 | hsa-asg-4448_st1 | 7.20 | 6.97 | 6.94 | 7.04 | 0.15 | 100 | 6.73 | 6.14 | 5.98 | 7.05 | 6.17 | 5.01 | 6.26 | 4.87 | 5.31 | 5.95 | 0.75 | 67 | 3.50E−02 | −1.09 | 2.1 |
| hsa-asg- | hsa-asg- | 6.06 | 5.98 | 5.82 | 5.95 | 0.12 | 100 | 4.81 | 4.95 | 5.89 | 5.45 | 4.97 | 4.07 | 5.09 | 4.21 | 4.32 | 4.86 | 0.59 | 0 | 1.21E−02 | −1.09 | 2.1 |
| 4460 | 4460_st2 | | | | | | | | | | | | | | | | | | | | | |
| hsa-asg- | hsa-asg- | 5.93 | 4.98 | 5.28 | 5.39 | 0.49 | 33 | 4.61 | 4.23 | 5.09 | 4.46 | 3.63 | 4.40 | 4.20 | 3.54 | 4.60 | 4.31 | 0.48 | 0 | 7.24E−03 | −1.09 | 2.1 |
| 6883 | 6883_st1 | | | | | | | | | | | | | | | | | | | | | |
| hsa-miR- | hsa-miR- | 9.76 | 10.3 | 10.0 | 10.03 | 0.28 | 100 | 9.83 | 9.37 | 8.91 | 9.35 | 8.95 | 8.34 | 8.55 | 8.21 | 9.05 | 8.95 | 0.52 | 100 | 7.50E−03 | −1.08 | 2.1 |
| 194 | 194_st2 | | | | | | | | | | | | | | | | | | | | | |
| hsa-asg- | hsa-asg- | 7.93 | 8.46 | 8.61 | 8.33 | 0.35 | 100 | 7.49 | 7.02 | 7.05 | 8.02 | 7.65 | 7.30 | 7.27 | 6.50 | 7.03 | 7.26 | 0.43 | 100 | 3.26E−03 | −1.07 | 2.1 |
| 3967 | 3967_st2 | | | | | | | | | | | | | | | | | | | | | |
| hsa-asg- | hsa-asg- | 5.45 | 5.71 | 5.94 | 5.70 | 0.25 | 100 | 5.22 | 4.66 | 4.39 | 5.17 | 5.35 | 4.73 | 4.07 | 3.99 | 4.32 | 4.66 | 0.50 | 0 | 6.97E−03 | −1.05 | 2.1 |
| 3124 | 3124_st2 | | | | | | | | | | | | | | | | | | | | | |
| hsa-asg-12179 | hsa-asg-12179_st1 | 6.45 | 6.26 | 6.38 | 6.36 | 0.10 | 100 | 6.16 | 5.04 | 5.45 | 5.68 | 5.39 | 4.93 | 4.82 | 5.04 | 5.35 | 5.32 | 0.42 | 11 | 2.04E−03 | −1.05 | 2.1 |
| hsa-asg- | hsa-asg- | 7.31 | 7.56 | 8.08 | 7.65 | 0.39 | 100 | 7.03 | 7.28 | 5.83 | 6.74 | 6.74 | 6.49 | 5.90 | 6.52 | 6.91 | 6.61 | 0.48 | 89 | 7.37E−03 | −1.04 | 2.1 |
| 12325 | 12325_st2 | | | | | | | | | | | | | | | | | | | | | |
| hsa-asg- | hsa-asg- | 5.90 | 6.45 | 6.66 | 6.34 | 0.39 | 100 | 5.07 | 5.55 | 6.14 | 5.75 | 5.05 | 5.57 | 4.54 | 5.26 | 4.78 | 5.30 | 0.50 | 56 | 8.86E−03 | −1.04 | 2.1 |
| 3854 | 3854_st1 | | | | | | | | | | | | | | | | | | | | | |
| hsa-asg- | hsa-asg- | 4.87 | 4.44 | 5.66 | 4.99 | 0.62 | 33 | 3.93 | 4.49 | 4.21 | 4.55 | 3.89 | 4.43 | 4.38 | 3.20 | 2.54 | 3.96 | 0.68 | 0 | 4.34E−02 | −1.03 | 2.0 |
| 8519 | 8519_st2 | | | | | | | | | | | | | | | | | | | | | |
| hsa-asg-10922 | hsa-asg-10922_st2 | 6.83 | 6.83 | 7.06 | 6.91 | 0.14 | 100 | 6.55 | 5.79 | 5.98 | 5.86 | 6.23 | 5.52 | 5.82 | 5.77 | 5.42 | 5.88 | 0.34 | 56 | 6.20E−04 | −1.03 | 2.0 |
| hsa-asg- | hsa-asg- | 7.88 | 8.78 | 8.13 | 8.26 | 0.47 | 100 | 7.58 | 7.47 | 7.55 | 8.17 | 7.24 | 6.59 | 6.87 | 7.00 | 6.68 | 7.24 | 0.51 | 100 | 1.16E−02 | −1.03 | 2.0 |
| 13279 | 13279_st1 | | | | | | | | | | | | | | | | | | | | | |
| hsa-asg- | hsa-asg- | 9.53 | 9.23 | 9.50 | 9.42 | 0.17 | 100 | 8.99 | 8.81 | 8.09 | 8.96 | 8.79 | 8.43 | 8.04 | 7.94 | 7.51 | 8.40 | 0.53 | 100 | 9.05E−03 | −1.02 | 2.0 |
| 954 | 954_st1 | | | | | | | | | | | | | | | | | | | | | |
| hsa-asg-7688 | hsa-asg-7688_st1 | 7.00 | 7.13 | 7.25 | 7.13 | 0.13 | 100 | 6.69 | 6.16 | 6.47 | 6.38 | 5.38 | 6.15 | 6.11 | 5.86 | 5.81 | 6.11 | 0.39 | 78 | 1.60E−03 | −1.02 | 2.0 |

SD, standard deviation;
%, percentage of samples expressing miRNA above background levels;
Log2Diff, difference in VSN-transformed expression between OVR and LNneg samples.

### Example 24

### miRNAs Differentally Expressed Between Normal Prostate Tissue and Normal Lymph Nodes

[0310] To identify miRNAs that may be useful markers for metastasis of cancerous prostate cells to lymph nodes, the inventors identified miRNAs that are expressed at significantly higher levels in normal prostate tissue than in cancer-negative lymph nodes.

[0311] Total RNA, purified from three separate normal human prostate tissue samples (FirstChoice® Human Prostate Total RNA, cat. no. AM7988; Ambion, Austin, Tex., USA) and from nine normal human lymph node samples (FirstChoice® Human Lymph Node Total RNA, cat. no. AM7894; Ambion, Austin, Tex., USA) was purchased from Ambion. miRNA purification and labeling and microarray expression analyses were performed as described above in Example 2.

[0312] The inventors identified 159 miRNAs (72 verified, 87 predicted) with significant differential expression between normal prostate and normal lymph nodes samples (|log 2Diff| prostate vs LN neg≧1 and p-value<0.05) (Table 23). Among the verified miRNAs, hsa-miR-205 and -375 had average expression levels over 100-fold higher in prostate tissue samples; hsa-miR-429, -206 and -187 had average expression levels over 50-fold higher in prostate samples; 13 miRNAs (hsa-miR-200b, -200a, -133b, -200c, -133a, -203, -493-5p, -605, -487b, -141, -96, -495, and -149) had average expression levels that were between 10- and 40-fold higher in prostate samples; and 18 miRNAs had average expression levels that were between 5- and 10-fold higher in prostate samples than in normal lymph nodes. Among the predicted miRNAs, hsa-asg-14153_st2 had an average expression level that was over 30-fold higher in prostate samples; hsa-asg-7637_st2, -4915_st1 and 5021_st1) had average expression levels that were between 10- and 20-fold higher in prostate samples; and 28 miRNAs had average expression levels that were between 5- and 10-fold higher in prostate tissue samples than in normal lymph nodes.

TABLE 23
MicroRNAs Differentially Expressed Between Normal Prostate Samples (PRO) and
Cancer-Negative Lymph Node Samples (LNneg) from Patients.

| | | PRO | | | | | | LNneg | | | | | | | | | | | | | | |
|---|---|---|---|---|---|---|---|---|---|---|---|---|---|---|---|---|---|---|---|---|---|---|
| Micro RNA | Probe ID | 1 | 2 | 3 | M | SD | % | 1 | 2 | 3 | 4 | 5 | 6 | 7 | 8 | 9 | M | SD | % | ttest | log2 Diff | Fold |
| hsa-miR-205 | hsa-miR-205_st1 | 11.7 | 12.6 | 13.4 | 12.6 | 0.84 | 100 | 2.93 | 5.91 | 5.64 | 2.03 | 3.59 | 6.11 | 3.40 | 5.32 | 7.76 | 4.74 | 1.85 | 33 | 3.90E−05 | −7.86 | 232 |
| hsa-miR-375 | hsa-miR-375_st1 | 12.0 | 10.5 | 12.9 | 11.8 | 1.18 | 100 | 5.96 | 4.93 | 6.23 | 2.85 | 2.97 | 3.69 | 0.99 | 4.63 | 6.39 | 4.29 | 1.82 | 0 | 5.83E−05 | −7.57 | 190 |
| hsa-miR-429 | hsa-miR-429_st1 | 7.99 | 9.26 | 9.52 | 8.92 | 0.82 | 100 | 3.45 | 1.54 | 3.67 | 2.13 | 2.37 | 2.69 | 2.32 | 2.45 | 5.39 | 2.89 | 1.14 | 0 | 7.94E−06 | −6.03 | 65.5 |
| hsa-miR-206 | hsa-miR-206_st2 | 10.2 | 12.0 | 11.7 | 11.3 | 0.94 | 100 | 4.09 | 4.99 | 1.92 | 9.39 | 3.97 | 5.85 | 8.46 | 4.47 | 5.00 | 5.35 | 2.31 | 44 | 1.59E−03 | −6.01 | 64.6 |
| hsa-miR-187 | hsa-miR-187_st1 | 7.99 | 9.53 | 9.69 | 9.07 | 0.94 | 100 | 4.76 | 2.79 | 2.76 | 3.77 | 3.22 | 3.37 | 3.05 | 3.38 | 3.17 | 3.37 | 0.61 | 0 | 2.05E−07 | −5.70 | 52.2 |
| hsa-miR-200b | hsa-miR-200b_st1 | 12.7 | 12.6 | 13.3 | 12.8 | 0.36 | 100 | 7.62 | 7.80 | 8.90 | 6.69 | 6.82 | 6.87 | 6.51 | 7.65 | 10.4 | 7.70 | 1.26 | 100 | 4.63E−05 | −5.19 | 36.5 |
| hsa-asg-14153 | hsa-asg-14153_st2 | 7.68 | 7.13 | 8.76 | 7.86 | 0.83 | 67 | 3.07 | 2.26 | 3.06 | 3.01 | 2.37 | 2.69 | 1.16 | 2.78 | 4.40 | 2.75 | 0.86 | 0 | 4.22E−06 | −5.10 | 34.4 |
| hsa-miR-200a | hsa-miR-200a_st2 | 10.0 | 10.5 | 11.1 | 10.5 | 0.55 | 100 | 6.27 | 5.08 | 6.49 | 5.72 | 5.29 | 4.60 | 4.07 | 4.78 | 7.78 | 5.56 | 1.14 | 67 | 2.96E−05 | −5.02 | 32.5 |
| hsa-miR-133b | hsa-miR-133b_st2 | 10.5 | 11.3 | 11.6 | 11.1 | 0.55 | 100 | 7.36 | 6.22 | 4.47 | 10.1 | 7.45 | 6.20 | 7.22 | 4.47 | 5.39 | 6.55 | 1.78 | 67 | 1.58E−03 | −4.62 | 24.6 |
| hsa-miR-200c | hsa-miR-200c_st1 | 12.9 | 13.3 | 14.0 | 13.4 | 0.51 | 100 | 9.60 | 8.84 | 10.3 | 8.18 | 8.15 | 8.14 | 7.98 | 8.89 | 11.5 | 9.07 | 1.21 | 100 | 1.37E−04 | −4.40 | 21.1 |
| hsa-asg-7637 | hsa-asg-7637_st2 | 7.82 | 7.31 | 9.13 | 8.09 | 0.94 | 100 | 3.66 | 2.54 | 4.47 | 3.46 | 3.93 | 4.03 | 3.29 | 3.64 | 5.27 | 3.81 | 0.76 | 0 | 1.19E−05 | −4.28 | 19.4 |
| hsa-miR-133a | hsa-miR-133a_st1 | 11.2 | 11.9 | 12.3 | 11.8 | 0.53 | 100 | 7.77 | 7.70 | 5.92 | 10.8 | 8.19 | 7.14 | 8.22 | 6.25 | 6.48 | 7.61 | 1.47 | 89 | 7.28E−04 | −4.26 | 19.1 |
| hsa-miR-203 | hsa-miR-203_st2 | 9.22 | 11.0 | 11.6 | 10.6 | 1.26 | 100 | 7.33 | 5.89 | 7.21 | 8.24 | 6.45 | 5.41 | 5.19 | 6.07 | 9.36 | 6.79 | 1.37 | 78 | 1.65E−03 | −3.84 | 14.3 |
| hsa-asg-4915 | hsa-asg-4915_st1 | 5.75 | 6.65 | 8.02 | 6.80 | 1.14 | 100 | 2.43 | 3.83 | 2.18 | 2.60 | 3.63 | 2.92 | 2.78 | 2.08 | 4.47 | 2.99 | 0.81 | 0 | 7.52E−05 | −3.81 | 14.0 |
| hsa-miR-493- | hsa-miR-493- | 8.12 | 8.58 | 8.73 | 8.48 | 0.32 | 100 | 4.37 | 3.83 | 6.88 | 6.18 | 6.33 | 3.69 | 4.38 | 1.88 | 4.60 | 4.68 | 1.56 | 33 | 2.32E−03 | −3.80 | 13.9 |
| 5p | 5p_st1 | | | | | | | | | | | | | | | | | | | | | |
| hsa-miR-605 | hsa-miR-605_st1 | 6.10 | 5.87 | 6.85 | 6.27 | 0.51 | 100 | 2.61 | 2.16 | 3.06 | 0.75 | 1.74 | 2.17 | 2.92 | 3.07 | 4.47 | 2.55 | 1.03 | 0 | 1.58E−04 | −3.73 | 13.2 |
| hsa-miR-487b | hsa-miR-487b_st2 | 8.61 | 9.09 | 10.0 | 9.24 | 0.71 | 100 | 6.06 | 5.84 | 6.97 | 6.90 | 6.25 | 5.40 | 4.90 | 3.74 | 4.40 | 5.61 | 1.10 | 67 | 3.65E−04 | −3.63 | 12.4 |
| hsa-miR-141 | hsa-miR-141_st1 | 6.41 | 8.42 | 8.49 | 7.77 | 1.18 | 100 | 5.07 | 3.83 | 4.93 | 4.43 | 4.39 | 2.85 | 3.85 | 3.83 | 4.54 | 4.19 | 0.68 | 0 | 5.60E−05 | −3.58 | 12.0 |
| hsa-miR-96 | hsa-miR-96_st1 | 6.90 | 6.98 | 6.55 | 6.81 | 0.23 | 100 | 4.99 | 3.42 | 3.06 | 3.01 | 4.11 | 2.85 | 3.05 | 1.88 | 3.09 | 3.27 | 0.86 | 11 | 4.73E−05 | −3.54 | 11.6 |
| hsa-miR-495 | hsa-miR-495_st1 | 8.33 | 8.64 | 9.40 | 8.79 | 0.55 | 100 | 6.02 | 4.81 | 6.97 | 6.26 | 6.32 | 4.43 | 5.16 | 2.45 | 4.89 | 5.26 | 1.35 | 56 | 1.54E−03 | −3.53 | 11.6 |
| hsa-asg-5021 | hsa-asg-5021_st1 | 7.61 | 7.99 | 8.89 | 8.16 | 0.66 | 100 | 5.18 | 4.43 | 6.99 | 6.06 | 5.91 | 3.54 | 4.59 | 3.07 | 2.10 | 4.65 | 1.57 | 22 | 4.28E−03 | −3.51 | 11.4 |
| hsa-miR-149 | hsa-miR-149_st2 | 6.03 | 6.08 | 7.52 | 6.55 | 0.84 | 67 | 4.49 | 3.87 | 1.79 | 4.15 | 2.76 | 1.48 | 2.48 | 3.38 | 3.17 | 3.07 | 1.03 | 0 | 3.87E−04 | −3.48 | 11.2 |
| hsa-miR-432 | hsa-miR-432_st2 | 7.51 | 8.04 | 8.85 | 8.13 | 0.67 | 100 | 4.55 | 5.43 | 5.92 | 5.53 | 5.77 | 5.68 | 3.50 | 4.28 | 2.74 | 4.82 | 1.13 | 22 | 8.16E−04 | −3.31 | 9.9 |
| hsa-miR-189 | hsa-miR-189_st1 | 7.73 | 9.11 | 9.12 | 8.65 | 0.80 | 100 | 6.08 | 5.79 | 4.93 | 7.23 | 6.18 | 4.55 | 4.94 | 3.54 | 4.95 | 5.36 | 1.08 | 44 | 7.36E−04 | −3.30 | 9.8 |
| hsa-miR-582 | hsa-miR-582_st1 | 7.21 | 7.74 | 8.31 | 7.75 | 0.55 | 100 | 5.85 | 2.16 | 4.54 | 5.96 | 4.89 | 4.10 | 4.07 | 4.35 | 4.67 | 4.51 | 1.12 | 22 | 8.02E−04 | −3.24 | 9.5 |
| hsa-asg-13254 | hsa-asg-13254_st1 | 7.48 | 8.05 | 8.79 | 8.11 | 0.66 | 100 | 5.60 | 5.37 | 6.65 | 5.89 | 5.90 | 4.03 | 4.73 | 2.45 | 3.39 | 4.89 | 1.36 | 56 | 3.20E−03 | −3.22 | 9.3 |
| hsa-miR-200a* | hsa-miR-200a-_st2 | 5.48 | 5.64 | 6.57 | 5.90 | 0.59 | 100 | 3.07 | 2.87 | 2.18 | 3.91 | 2.61 | 1.78 | 2.15 | 3.20 | 2.92 | 2.74 | 0.65 | 0 | 2.20E−05 | −3.15 | 8.9 |
| hsa-miR-539 | hsa-miR-539_st1 | 4.74 | 5.81 | 6.44 | 5.66 | 0.86 | 67 | 2.05 | 3.16 | 2.66 | 3.40 | 2.69 | 2.99 | 1.97 | 2.62 | 1.38 | 2.55 | 0.64 | 0 | 4.97E−05 | −3.12 | 8.7 |
| hsa-miR-539 | hsa-miR177_st1 | 4.39 | 5.62 | 5.64 | 5.21 | 0.72 | 67 | 2.61 | 2.54 | 1.39 | 2.42 | 1.83 | 1.88 | 3.50 | 1.68 | 2.10 | 2.22 | 0.63 | 0 | 4.05E−05 | −3.00 | 8.0 |
| hsa-asg-924 | hsa-asg-924_st1 | 5.28 | 6.62 | 7.64 | 6.51 | 1.18 | 67 | 4.66 | 4.30 | 3.39 | 4.46 | 2.69 | 2.77 | 2.15 | 2.78 | 3.53 | 3.41 | 0.89 | 0 | 6.72E−04 | −3.10 | 8.6 |
| hsa-miR-411 | hsa-miR-411_st1 | 5.70 | 7.53 | 7.55 | 6.93 | 1.07 | 100 | 4.85 | 3.74 | 4.54 | 5.23 | 5.56 | 2.99 | 3.40 | 2.27 | 2.10 | 3.85 | 1.27 | 11 | 3.77E−03 | −3.07 | 8.4 |
| hsa-asg-11088 | hsa-asg-11088_st1 | 5.39 | 5.57 | 5.17 | 5.38 | 0.20 | 67 | 1.25 | 1.05 | 3.85 | 1.82 | 0.94 | 2.35 | 1.60 | 3.38 | 4.50 | 2.31 | 1.31 | 0 | 2.83E−03 | −3.07 | 8.4 |
| hsa-asg-10131 | hsa-asg-10131_st2 | 5.54 | 6.48 | 6.83 | 6.29 | 0.67 | 100 | 3.33 | 3.16 | 3.54 | 2.51 | 2.53 | 3.26 | 2.64 | 3.20 | 5.09 | 3.25 | 0.78 | 0 | 1.37E−04 | −3.04 | 8.2 |
| hsa-miR-409-3p | hsa-miR-409-3p_st1 | 5.58 | 6.95 | 7.85 | 6.79 | 1.14 | 33 | 2.25 | 3.47 | 5.14 | 4.99 | 4.77 | 2.99 | 3.96 | 2.62 | 3.77 | 3.77 | 1.05 | 0 | 1.68E−03 | −3.02 | 8.1 |
| hsa-asg-11715 | hsa-asg-11715_st2 | 4.20 | 4.75 | 5.85 | 4.93 | 0.84 | 33 | 1.85 | 2.36 | 2.18 | 1.51 | 2.11 | 1.78 | 0.62 | 1.48 | 3.39 | 1.92 | 0.75 | 0 | 1.61E−04 | −3.01 | 8.1 |
| hsa-asg-10247 | hsa-asg-10247_st1 | 4.59 | 5.71 | 6.31 | 5.54 | 0.87 | 67 | 2.78 | 2.16 | 4.02 | 1.72 | 2.19 | 2.35 | 0.35 | 3.20 | 3.97 | 2.53 | 1.14 | 0 | 2.07E−03 | −3.01 | 8.1 |
| hsa-asg-13404 | hsa-asg-13404_st2 | 5.22 | 4.90 | 7.38 | 5.84 | 1.35 | 33 | 4.17 | 2.71 | 5.28 | 2.93 | 3.28 | 1.58 | 2.15 | 1.11 | 2.33 | 2.84 | 1.29 | 0 | 6.15E−03 | −3.00 | 8.0 |
| hsa-miR-204 | hsa-miR-204_st2 | 8.86 | 8.36 | 10.24 | 9.15 | 0.98 | 100 | 7.18 | 5.82 | 5.98 | 8.21 | 6.76 | 5.46 | 5.19 | 5.42 | 5.78 | 6.20 | 0.99 | 44 | 1.16E−03 | −2.96 | 7.8 |
| hsa-miR-381 | hsa-miR-381_st2 | 4.77 | 7.74 | 5.68 | 6.06 | 1.52 | 67 | 2.78 | 2.36 | 4.21 | 3.40 | 4.21 | 2.99 | 3.50 | 1.29 | 3.25 | 3.11 | 0.91 | 0 | 1.93E−03 | −2.95 | 7.7 |
| hsa-miR-183 | hsa-miR-183_st1 | 9.91 | 9.59 | 10.13 | 9.88 | 0.27 | 100 | 7.66 | 6.76 | 6.71 | 7.93 | 7.56 | 5.83 | 7.52 | 6.32 | 6.65 | 6.99 | 0.70 | 89 | 5.14E−05 | −2.88 | 7.4 |
| hsa-miR-154 | hsa-miR-154_st2 | 5.83 | 7.13 | 6.14 | 6.37 | 0.68 | 100 | 3.76 | 2.54 | 4.30 | 4.36 | 4.91 | 3.13 | 3.17 | 1.29 | 3.97 | 3.49 | 1.10 | 0 | 1.88E−03 | −2.87 | 7.3 |
| hsa-asg-5617 | hsa-asg-5617_st1 | 5.40 | 5.79 | 5.84 | 5.68 | 0.24 | 100 | 3.76 | 3.29 | 3.91 | 3.63 | 3.44 | 2.69 | 1.42 | 1.48 | 1.62 | 2.80 | 1.03 | 0 | 9.29E−04 | −2.87 | 7.3 |
| hsa-asg-5119 | hsa-asg-5119_st1 | 5.08 | 5.29 | 5.81 | 5.39 | 0.38 | 100 | 2.43 | 2.71 | 1.92 | 1.93 | 2.01 | 2.53 | 2.92 | 2.62 | 3.65 | 2.53 | 0.55 | 0 | 9.36E−06 | −2.87 | 7.3 |
| hsa-asg-4978 | hsa-asg-4978_st2 | 5.26 | 5.04 | 5.84 | 5.38 | 0.41 | 100 | 1.65 | 2.87 | 2.86 | 1.72 | 2.01 | 1.97 | 2.78 | 2.62 | 4.16 | 2.52 | 0.79 | 0 | 1.50E−04 | −2.86 | 7.3 |
| hsa-asg-12139 | hsa-asg-12139_st2 | 5.56 | 5.37 | 4.69 | 5.21 | 0.46 | 67 | 2.78 | 2.36 | 2.66 | 2.33 | 1.64 | 2.17 | 1.60 | 2.08 | 3.53 | 2.35 | 0.59 | 0 | 1.98E−05 | −2.86 | 7.3 |
| hsa-asg-1296 | hsa-asg-1296_st1 | 6.40 | 5.29 | 6.59 | 6.09 | 0.70 | 100 | 3.07 | 2.54 | 4.81 | 2.42 | 2.53 | 2.77 | 3.17 | 3.91 | 4.16 | 3.27 | 0.84 | 0 | 4.01E−04 | −2.83 | 7.1 |
| hsa-asg-13705 | hsa-asg-13705_st1 | 4.99 | 4.79 | 5.50 | 5.09 | 0.37 | 67 | 1.65 | 0.95 | 3.79 | 2.33 | 2.69 | 2.35 | 0.35 | 3.20 | 3.25 | 2.29 | 1.12 | 0 | 2.04E−03 | −2.81 | 7.0 |
| hsa-asg-14176 | hsa-asg-14176_st1 | 7.32 | 8.69 | 8.66 | 8.23 | 0.78 | 100 | 6.06 | 5.72 | 5.28 | 6.77 | 6.26 | 5.43 | 5.46 | 4.21 | 4.16 | 5.48 | 0.87 | 44 | 7.11E−04 | −2.74 | 6.7 |
| hsa-miR-368 | hsa-miR-368_st2 | 7.82 | 9.82 | 9.38 | 9.01 | 1.05 | 100 | 6.49 | 6.52 | 7.70 | 8.08 | 7.70 | 5.24 | 5.64 | 3.99 | 5.09 | 6.27 | 1.39 | 67 | 1.16E−02 | −2.73 | 6.7 |
| hsa-miR-329 | hsa-miR-329_st1 | 5.93 | 6.28 | 6.13 | 6.12 | 0.18 | 100 | 3.76 | 3.02 | 4.61 | 3.28 | 4.58 | 2.85 | 2.78 | 3.32 | 2.74 | 3.44 | 0.73 | 0 | 1.14E−04 | −2.68 | 6.4 |
| hsa-miR-329 | hsa-asg-13589_st2 | 5.52 | 5.85 | 5.53 | 5.63 | 0.19 | 100 | 1.65 | 3.16 | 3.79 | 3.73 | 4.42 | 2.35 | 3.68 | 2.78 | 3.09 | 3.18 | 0.84 | 0 | 6.70E−04 | −2.45 | 5.5 |
| hsa-miR-329 | hsa-asg-13204_st2 | 5.94 | 6.12 | 6.09 | 6.05 | 0.09 | 100 | 4.09 | 2.87 | 4.21 | 3.40 | 4.24 | 3.48 | 4.00 | 2.62 | 3.53 | 3.61 | 0.59 | 0 | 3.79E−05 | −2.45 | 5.4 |
| hsa-asg-13166 | hsa-asg-13166_st2 | 6.12 | 6.67 | 7.10 | 6.63 | 0.49 | 100 | 4.49 | 3.42 | 4.87 | 4.95 | 4.11 | 4.18 | 3.59 | 2.08 | 4.07 | 3.97 | 0.88 | 0 | 6.32E−04 | −2.66 | 6.3 |
| hsa-miR-499 | hsa-miR12_st1 | 6.16 | 8.55 | 7.91 | 7.54 | 1.24 | 100 | 5.45 | 4.81 | 5.37 | 6.66 | 4.11 | 4.43 | 4.82 | 4.58 | 3.87 | 4.90 | 0.84 | 22 | 1.72E−03 | −2.64 | 6.2 |
| hsa-miR-499 | hsa-miR-499_st1 | 5.90 | 8.15 | 7.92 | 7.32 | 1.24 | 100 | 5.32 | 4.66 | 4.75 | 6.58 | 4.53 | 4.18 | 5.05 | 4.28 | 4.60 | 4.88 | 0.73 | 22 | 1.61E−03 | −2.44 | 5.4 |
| hsa-miR-127 | hsa-miR-127_st1 | 8.83 | 8.69 | 9.84 | 9.12 | 0.63 | 100 | 6.81 | 5.57 | 7.95 | 7.53 | 7.69 | 5.72 | 6.59 | 5.49 | 5.44 | 6.53 | 1.02 | 56 | 2.25E−03 | −2.59 | 6.0 |
| hsa-miR-376a | hsa-miR-376a_st2 | 6.10 | 7.78 | 6.98 | 6.95 | 0.84 | 100 | 5.14 | 4.08 | 5.49 | 5.67 | 4.85 | 4.03 | 2.48 | 3.83 | 3.77 | 4.37 | 1.01 | 0 | 2.72E−03 | −2.58 | 6.0 |
| hsa-miR-376a | hsa-asg-14234_st1 | 4.74 | 7.08 | 6.60 | 6.14 | 1.24 | 67 | 3.33 | 4.30 | 3.39 | 4.00 | 4.85 | 3.69 | 2.92 | 4.07 | 1.86 | 3.60 | 0.87 | 0 | 2.57E−03 | −2.54 | 5.8 |
| hsa-miR-376a | hsa-asg-10049_st1 | 6.16 | 8.16 | 7.42 | 7.25 | 1.01 | 100 | 5.03 | 4.91 | 6.09 | 5.56 | 5.35 | 4.10 | 3.85 | 4.14 | 4.67 | 4.85 | 0.74 | 11 | 1.20E−03 | −2.39 | 5.2 |
| hsa-asg-10055 | hsa-asg-10055_st1 | 4.55 | 4.43 | 4.64 | 4.54 | 0.11 | 33 | 2.05 | 0.95 | 2.18 | 1.11 | 2.01 | 2.69 | 1.42 | 2.27 | 2.92 | 1.96 | 0.68 | 0 | 7.92E−05 | −2.58 | 6.0 |
| hsa-asg-10587 | hsa-asg-10587_st2 | 4.47 | 5.14 | 6.36 | 5.32 | 0.96 | 67 | 3.07 | 3.02 | 3.06 | 3.34 | 1.83 | 3.32 | 1.60 | 2.62 | 2.92 | 2.75 | 0.63 | 0 | 2.77E−04 | −2.57 | 5.9 |
| hsa-asg-4219 | hsa-asg-4219_st1 | 4.96 | 4.83 | 5.22 | 5.00 | 0.20 | 67 | 3.45 | 1.75 | 1.66 | 1.51 | 2.28 | 1.78 | 2.92 | 2.78 | 3.97 | 2.46 | 0.87 | 0 | 6.70E−04 | −2.55 | 5.8 |
| hsa-asg-11160 | hsa-asg-11160_st2 | 5.41 | 5.96 | 5.88 | 5.75 | 0.30 | 100 | 2.78 | 3.16 | 3.39 | 3.08 | 2.90 | 2.69 | 2.48 | 3.54 | 5.14 | 3.24 | 0.79 | 0 | 3.69E−04 | −2.51 | 5.7 |
| hsa-miR-410 | hsa-miR-410_st1 | 4.30 | 5.81 | 5.01 | 5.04 | 0.76 | 67 | 2.43 | 2.36 | 1.39 | 3.73 | 2.53 | 2.85 | 3.17 | 1.88 | 2.54 | 2.54 | 0.68 | 0 | 3.11E−04 | −2.50 | 5.6 |
| hsa-asg-1088 | hsa-asg-1088_st1 | 4.22 | 3.47 | 5.64 | 4.44 | 1.10 | 33 | 1.85 | 2.16 | 1.66 | 1.61 | 2.11 | 0.84 | 3.29 | 1.48 | 2.54 | 1.95 | 0.69 | 0 | 8.13E−04 | −2.50 | 5.6 |
| hsa-asg-10106 | hsa-asg-10106_st1 | 3.53 | 4.94 | 5.65 | 4.71 | 1.08 | 33 | 3.33 | 2.36 | 1.66 | 1.31 | 2.45 | 1.78 | 1.97 | 2.62 | 2.54 | 2.22 | 0.61 | 0 | 4.54E−04 | −2.48 | 5.6 |
| hsa-asg-10080 | hsa-asg-10080_st1 | 3.99 | 5.32 | 5.13 | 4.81 | 0.72 | 33 | 2.05 | 1.75 | 2.43 | 1.82 | 2.37 | 2.44 | 2.48 | 2.27 | 3.39 | 2.33 | 0.48 | 0 | 4.12E−05 | −2.48 | 5.6 |
| hsa-asg-3822 | hsa-asg-3822_st2 | 4.22 | 5.57 | 5.86 | 5.22 | 0.87 | 67 | 2.05 | 3.02 | 3.67 | 2.03 | 2.45 | 2.17 | 1.60 | 2.93 | 4.78 | 2.75 | 0.99 | 0 | 3.29E−03 | −2.47 | 5.6 |
| hsa-miR-369-5p | hsa-asg-1521_st1 | 5.33 | 6.13 | 6.15 | 5.87 | 0.47 | 67 | 3.76 | 3.42 | 4.02 | 2.23 | 3.72 | 3.73 | 3.40 | 2.78 | 3.53 | 3.40 | 0.56 | 0 | 4.48E−05 | −2.47 | 5.6 |
| hsa-miR-369- | hsa-miR-369- | 4.90 | 6.08 | 6.78 | 5.92 | 0.95 | 100 | 3.56 | 2.71 | 4.47 | 4.36 | 4.36 | 2.53 | 2.92 | 2.62 | 3.53 | 3.45 | 0.80 | 0 | 1.21E−03 | −2.47 | 5.5 |
| 5p | 5p_st2 | | | | | | | | | | | | | | | | | | | | | |
| hsa-asg-13297 | hsa-asg-13297_st1 | 3.37 | 4.27 | 5.87 | 4.50 | 1.27 | 33 | 2.43 | 2.54 | 2.66 | 0.58 | 2.61 | 1.78 | 2.15 | 1.48 | 2.74 | 2.11 | 0.71 | 0 | 1.79E−03 | −2.40 | 5.3 |
| hsa-asg-9980 | hsa-asg-9980_st1 | 6.07 | 5.96 | 6.85 | 6.30 | 0.48 | 100 | 5.18 | 4.49 | 4.02 | 1.72 | 3.39 | 2.85 | 3.85 | 5.08 | 4.67 | 3.92 | 1.12 | 11 | 5.99E−03 | −2.38 | 5.2 |
| hsa-asg-2345 | hsa-asg-2345_st2 | 4.25 | 5.26 | 4.74 | 4.75 | 0.51 | 33 | 1.65 | 2.54 | 2.43 | 3.63 | 1.46 | 2.53 | 3.17 | 2.62 | 1.38 | 2.38 | 0.76 | 0 | 5.84E−04 | −2.37 | 5.2 |
| hsa-asg-8054 | hsa-asg-8054_st1 | 4.20 | 4.43 | 5.17 | 4.60 | 0.51 | 33 | 3.45 | 2.36 | 1.39 | 1.72 | 2.37 | 1.19 | 3.05 | 2.08 | 2.54 | 2.24 | 0.74 | 0 | 4.80E−04 | −2.36 | 5.1 |
| hsa-miR202 | hsa-miR202_st2 | 4.77 | 5.04 | 7.63 | 5.82 | 1.58 | 67 | 3.85 | 2.71 | 4.93 | 3.95 | 3.63 | 2.44 | 4.27 | 2.45 | 3.09 | 3.48 | 0.87 | 0 | 7.45E−03 | −2.33 | 5.0 |
| hsa-asg-11361 | hsa-asg-11361_st2 | 5.16 | 5.53 | 6.46 | 5.71 | 0.67 | 100 | 2.78 | 3.53 | 3.39 | 3.28 | 3.63 | 3.37 | 3.85 | 2.62 | 4.32 | 3.42 | 0.52 | 0 | 9.51E−05 | −2.29 | 4.9 |
| hsa-asg-8174 | hsa-asg-8174_st1 | 5.68 | 5.08 | 5.78 | 5.51 | 0.38 | 67 | 3.33 | 4.08 | 2.86 | 3.01 | 2.90 | 3.26 | 2.78 | 2.78 | 4.16 | 3.24 | 0.53 | 0 | 5.29E−05 | −2.27 | 4.8 |
| Has-cand206 | hsa-cand206_st1 | 4.55 | 5.01 | 5.27 | 4.95 | 0.37 | 67 | 2.25 | 1.96 | 3.79 | 3.63 | 2.69 | 2.17 | 3.59 | 1.29 | 2.74 | 2.68 | 0.86 | 0 | 1.46E−03 | −2.27 | 4.8 |
| hsa-miR-182 | hsa-miR-182_st1 | 11.4 | 11.4 | 11.7 | 11.5 | 0.21 | 100 | 10.2 | 10.0 | 8.85 | 9.82 | 9.37 | 9.55 | 8.99 | 8.57 | 8.13 | 9.28 | 0.70 | 100 | 3.32E−04 | −2.25 | 4.8 |
| hsa-asg-2027 | hsa-asg-2027_st1 | 5.21 | 6.95 | 6.41 | 6.19 | 0.89 | 100 | 3.56 | 3.53 | 1.66 | 5.23 | 4.47 | 4.24 | 4.27 | 4.21 | 4.54 | 3.97 | 1.01 | 0 | 6.94E−03 | −2.22 | 4.7 |
| hsa-asg-4914 | hsa-asg-4914_st1 | 4.59 | 5.14 | 4.64 | 4.79 | 0.31 | 33 | 2.78 | 3.29 | 0.13 | 3.87 | 3.10 | 2.07 | 2.48 | 3.44 | 2.33 | 2.61 | 1.09 | 0 | 7.73E−03 | −2.18 | 4.5 |
| hsa-miR-299- | hsa-miR-299- | 7.35 | 5.87 | 7.55 | 6.92 | 0.92 | 100 | 5.73 | 4.49 | 5.80 | 6.38 | 5.99 | 2.99 | 5.05 | 2.45 | 3.97 | 4.76 | 1.39 | 44 | 3.25E−02 | −2.16 | 4.5 |
| 5p | 5p_st2 | | | | | | | | | | | | | | | | | | | | | |
| hsa-miR-487a | hsa-miR-487a_st2 | 4.04 | 4.90 | 5.05 | 4.67 | 0.54 | 33 | 2.25 | 2.87 | 2.66 | 3.40 | 2.19 | 3.26 | 0.91 | 2.27 | 2.92 | 2.53 | 0.75 | 0 | 1.11E−03 | −2.14 | 4.4 |
| hsa-miR-487a | hsa-asg-6915_st1 | 5.13 | 5.67 | 6.01 | 5.60 | 0.45 | 100 | 4.09 | 3.64 | 3.91 | 3.40 | 3.89 | 3.78 | 3.68 | 3.74 | 3.65 | 3.75 | 0.20 | 0 | 1.09E−06 | −1.85 | 3.6 |
| hsa-asg-1826 | hsa-asg-1826_st2 | 4.59 | 4.83 | 5.24 | 4.89 | 0.33 | 100 | 3.33 | 3.02 | 2.18 | 3.57 | 2.53 | 2.17 | 2.92 | 3.13 | 1.86 | 2.75 | 0.59 | 0 | 1.57E−04 | −2.14 | 4.4 |
| Has-cand26 | hsa-cand26_st2 | 7.12 | 5.85 | 8.37 | 7.11 | 1.26 | 100 | 6.12 | 5.61 | 6.03 | 4.08 | 3.68 | 4.75 | 5.29 | 4.07 | 5.46 | 5.01 | 0.90 | 22 | 9.41E−03 | −2.10 | 4.3 |
| hsa-miR-433 | hsa-miR-433_st2 | 4.36 | 4.57 | 5.79 | 4.91 | 0.77 | 33 | 2.43 | 2.71 | 4.54 | 2.93 | 4.21 | 2.35 | 1.60 | 1.68 | 2.92 | 2.82 | 1.00 | 0 | 8.65E−03 | −2.09 | 4.2 |
| hsa-asg-10202 | hsa-asg-10202_st2 | 5.55 | 4.43 | 5.61 | 5.20 | 0.67 | 33 | 4.71 | 2.06 | 3.31 | 5.25 | 3.10 | 1.97 | 2.48 | 3.38 | 1.74 | 3.11 | 1.22 | 0 | 2.00E−02 | −2.09 | 4.2 |
| hsa-miR-134 | hsa-miR-134_st2 | 6.32 | 7.68 | 7.77 | 7.26 | 0.82 | 100 | 5.11 | 5.78 | 5.99 | 5.85 | 5.70 | 4.21 | 4.73 | 4.31 | 5.02 | 5.19 | 0.68 | 0 | 1.35E−03 | −2.07 | 4.2 |
| hsa-miR-1 | hsa-miR-1_st1 | 11.7 | 11.9 | 12.5 | 12.0 | 0.40 | 100 | 11.0 | 10.8 | 8.18 | 11.7 | 10.7 | 10.0 | 10.1 | 7.66 | 9.47 | 9.99 | 1.35 | 100 | 2.99E−02 | −2.06 | 4.2 |
| hsa-asg-10391 | hsa-asg-10391_st2 | 5.70 | 6.86 | 7.06 | 6.54 | 0.73 | 100 | 5.62 | 5.68 | 2.96 | 5.39 | 5.57 | 4.03 | 3.59 | 2.70 | 4.81 | 4.48 | 1.19 | 11 | 1.97E−02 | −2.06 | 4.2 |
| hsa-asg-7471 | hsa-asg-7471_st1 | 7.24 | 7.68 | 8.23 | 7.72 | 0.49 | 100 | 5.60 | 5.72 | 5.67 | 6.74 | 5.70 | 5.30 | 5.25 | 5.00 | 6.09 | 5.68 | 0.51 | 56 | 1.28E−04 | −2.04 | 4.1 |
| hsa-asg-1596 | hsa-asg-1596_st2 | 5.94 | 6.34 | 6.53 | 6.27 | 0.30 | 100 | 4.43 | 5.12 | 4.02 | 3.21 | 4.39 | 4.18 | 4.14 | 4.21 | 4.40 | 4.23 | 0.50 | 0 | 6.20E−05 | −2.04 | 4.1 |
| hsa-asg-10393 | Has-asg-10393_st1 | 3.87 | 5.01 | 5.24 | 4.71 | 0.73 | 67 | 2.78 | 1.54 | 2.43 | 3.91 | 2.83 | 2.85 | 1.79 | 3.54 | 2.54 | 2.69 | 0.75 | 0 | 2.31E−03 | −2.02 | 4.0 |
| hsa-asg-13135 | hsa-asg-13135_st1 | 7.12 | 5.96 | 8.36 | 7.15 | 1.20 | 100 | 5.62 | 5.67 | 5.24 | 4.91 | 4.79 | 4.75 | 5.16 | 4.47 | 5.60 | 5.13 | 0.43 | 22 | 1.04E−03 | −2.02 | 4.0 |
| hsa-asg-13284 | hsa-asg-13284_st1 | 5.67 | 5.57 | 6.39 | 5.88 | 0.45 | 100 | 4.90 | 2.06 | 3.60 | 5.83 | 4.85 | 2.85 | 4.73 | 3.78 | 2.44 | 3.89 | 1.28 | 0 | 2.82E−02 | −1.98 | 4.0 |
| hsa-miR-31 | hsa-miR-31_st2 | 9.86 | 11.4 | 12.2 | 11.1 | 1.20 | 100 | 10.4 | 9.79 | 8.95 | 10.1 | 8.71 | 8.60 | 7.73 | 8.68 | 10.1 | 9.23 | 0.91 | 100 | 1.35E−02 | −1.95 | 3.9 |
| hsa-miR-517a | hsa-miR-517b_st1 | 6.82 | 5.35 | 6.39 | 6.19 | 0.76 | 100 | 4.99 | 5.61 | 6.51 | 3.87 | 3.22 | 3.82 | 4.07 | 3.91 | 2.54 | 4.28 | 1.22 | 22 | 3.16E−02 | −1.90 | 3.7 |
| hsa-miR-517a | hsa-miR-517a_st1 | 6.81 | 5.08 | 5.97 | 5.95 | 0.87 | 100 | 4.85 | 5.37 | 6.26 | 3.57 | 3.10 | 3.82 | 4.20 | 3.74 | 1.86 | 4.09 | 1.29 | 0 | 4.43E−02 | −1.87 | 3.6 |
| hsa-miR-576 | hsa-miR-576_st2 | 2.69 | 4.62 | 5.37 | 4.23 | 1.38 | 33 | 2.25 | 2.87 | 3.06 | 1.72 | 2.01 | 1.97 | 1.97 | 2.08 | 3.09 | 2.34 | 0.53 | 0 | 4.47E−03 | −1.89 | 3.7 |
| hsa-miR-338 | hsa-miR-338_st1 | 5.37 | 6.28 | 6.88 | 6.18 | 0.76 | 100 | 5.11 | 4.08 | 5.57 | 4.86 | 4.04 | 2.17 | 4.78 | 3.44 | 4.89 | 4.33 | 1.03 | 11 | 1.81E−02 | −1.85 | 3.6 |
| hsa-asg-280 | hsa-asg-280_st1 | 4.10 | 4.43 | 5.99 | 4.84 | 1.01 | 33 | 3.21 | 2.71 | 4.47 | 2.13 | 2.53 | 2.17 | 1.79 | 3.44 | 4.54 | 3.00 | 1.00 | 0 | 2.01E−02 | −1.84 | 3.6 |
| hsa-asg- | hsa-asg-14172_st1 | 5.78 | 5.57 | 6.68 | 6.01 | 0.59 | 100 | 5.07 | 2.71 | 4.47 | 5.45 | 4.81 | 2.77 | 3.59 | 3.74 | 5.18 | 4.20 | 1.03 | 0 | 1.79E−02 | −1.81 | 3.5 |
| 14172 | | | | | | | | | | | | | | | | | | | | | | |
| hsa-miR-485- | hsa-miR23_st2 | 5.18 | 4.32 | 5.70 | 5.07 | 0.70 | 67 | 4.31 | 2.54 | 4.12 | 3.28 | 2.45 | 3.26 | 3.59 | 2.78 | 3.09 | 3.27 | 0.65 | 0 | 2.16E−03 | −1.80 | 3.5 |
| 3p | | | | | | | | | | | | | | | | | | | | | | |
| hsa-miR-379 | hsa-miR-379_st1 | 7.03 | 8.80 | 9.26 | 8.36 | 1.17 | 100 | 6.52 | 6.42 | 7.11 | 6.97 | 7.04 | 6.59 | 6.35 | 6.14 | 6.23 | 6.60 | 0.36 | 100 | 1.56E−03 | −1.77 | 3.4 |
| hsa-asg-6178 | hsa-asg-6178_st2 | 3.20 | 4.21 | 4.84 | 4.08 | 0.83 | 33 | 2.43 | 3.42 | 2.43 | 3.82 | 2.19 | 1.19 | 0.76 | 2.27 | 2.33 | 2.32 | 0.95 | 0 | 1.68E−02 | −1.77 | 3.4 |
| hsa-asg-1765 | hsa-asg-1765_st1 | 4.43 | 4.21 | 4.41 | 4.35 | 0.12 | 33 | 2.25 | 2.16 | 2.86 | 3.63 | 2.37 | 2.35 | 3.29 | 2.27 | 2.10 | 2.59 | 0.55 | 0 | 3.11E−04 | −1.76 | 3.4 |
| hsa-miR-382 | hsa-miR-382_st1 | 7.72 | 8.68 | 9.06 | 8.49 | 0.69 | 100 | 7.17 | 6.85 | 7.35 | 7.13 | 7.43 | 6.56 | 6.29 | 5.93 | 5.81 | 6.72 | 0.61 | 78 | 1.76E−03 | −1.76 | 3.4 |
| hsa-asg-3711 | hsa-asg-3711_st2 | 6.96 | 6.77 | 7.14 | 6.96 | 0.19 | 100 | 5.70 | 6.17 | 5.12 | 5.53 | 5.14 | 5.25 | 4.54 | 4.44 | 4.87 | 5.19 | 0.55 | 0 | 3.61E−04 | −1.76 | 3.4 |
| hsa-asg- | hsa-asg-12690_st1 | 5.05 | 3.81 | 5.39 | 4.75 | 0.83 | 67 | 3.76 | 2.87 | 2.66 | 3.40 | 3.49 | 2.85 | 2.92 | 2.93 | 2.10 | 3.00 | 0.49 | 0 | 1.07E−03 | −1.75 | 3.4 |
| 12690 | | | | | | | | | | | | | | | | | | | | | | |
| hsa-miR-376b | hsa-miR-376b_st1 | 3.37 | 5.08 | 3.63 | 4.03 | 0.92 | 33 | 1.85 | 2.16 | 4.12 | 3.34 | 2.69 | 1.01 | 2.78 | 2.53 | 0.21 | 2.30 | 1.18 | 0 | 4.49E−02 | −1.73 | 3.3 |
| hsa-asg-378 | hsa-asg-378_st1 | 4.55 | 4.97 | 3.82 | 4.45 | 0.59 | 33 | 2.25 | 2.71 | 2.18 | 4.71 | 2.83 | 2.99 | 1.08 | 2.78 | 3.09 | 2.74 | 0.96 | 0 | 1.72E−02 | −1.71 | 3.3 |
| hsa-asg-2399 | hsa-asg-2399_st2 | 3.20 | 5.04 | 4.53 | 4.26 | 0.95 | 33 | 3.07 | 3.42 | 2.86 | 3.01 | 2.19 | 2.53 | 1.08 | 2.27 | 2.54 | 2.55 | 0.68 | 0 | 6.26E−03 | −1.71 | 3.3 |
| hsa-miR-101 | hsa-miR-101_st1 | 6.18 | 7.95 | 7.41 | 7.18 | 0.91 | 100 | 7.18 | 6.53 | 4.21 | 5.98 | 6.52 | 4.70 | 4.86 | 4.35 | 5.09 | 5.49 | 1.08 | 44 | 3.61E−02 | −1.69 | 3.2 |
| hsa-miR-218 | hsa-miR-218_st2 | 9.61 | 10.7 | 11.1 | 10.4 | 0.79 | 100 | 9.62 | 9.27 | 8.82 | 9.68 | 9.16 | 8.64 | 7.76 | 7.45 | 8.75 | 8.80 | 0.77 | 100 | 8.28E−03 | −1.69 | 3.2 |
| hsa-miR-363 | hsa-miR-363_st2 | 11.0 | 11.4 | 11.9 | 11.4 | 0.47 | 100 | 10.6 | 10.0 | 9.90 | 10.2 | 9.04 | 9.40 | 10.0 | 9.11 | 9.94 | 9.81 | 0.52 | 100 | 5.61E−04 | −1.69 | 3.2 |
| hsa-asg-1701 | hsa-asg-1701_st2 | 5.24 | 5.75 | 4.41 | 5.14 | 0.68 | 33 | 4.90 | 3.16 | 3.91 | 4.63 | 3.68 | 2.99 | 3.29 | 2.93 | 1.62 | 3.46 | 0.98 | 0 | 2.19E−02 | −1.68 | 3.2 |
| hsa-miR-154* | hsa-miR-154-_st2 | 5.68 | 6.08 | 6.26 | 6.01 | 0.30 | 100 | 5.83 | 3.53 | 4.21 | 4.99 | 4.63 | 3.95 | 4.27 | 3.20 | 4.40 | 4.33 | 0.78 | 11 | 5.35E−03 | −1.67 | 3.2 |
| hsa-asg-8411 | hsa-asg-8411_st2 | 6.06 | 6.13 | 7.03 | 6.41 | 0.54 | 100 | 5.92 | 4.49 | 5.04 | 6.08 | 5.09 | 4.87 | 4.14 | 2.93 | 4.07 | 4.73 | 0.97 | 22 | 1.94E−02 | −1.67 | 3.2 |
| hsa-asg- | hsa-asg-10881_st1 | 6.74 | 6.02 | 7.90 | 6.89 | 0.95 | 100 | 5.73 | 5.04 | 6.06 | 5.43 | 4.79 | 5.46 | 4.20 | 5.04 | 5.23 | 5.22 | 0.54 | 22 | 3.07E−03 | −1.67 | 3.2 |
| 10881 | | | | | | | | | | | | | | | | | | | | | | |
| hsa-asg-548 | hsa-asg-548_st1 | 4.55 | 4.43 | 5.20 | 4.73 | 0.42 | 33 | 3.07 | 1.96 | 3.54 | 3.52 | 2.83 | 1.97 | 3.40 | 2.78 | 4.60 | 3.07 | 0.83 | 0 | 8.62E−03 | −1.65 | 3.1 |
| hsa-miR-494 | hsa-miR-494_st1 | 6.95 | 9.16 | 8.93 | 8.35 | 1.21 | 100 | 6.40 | 7.30 | 7.22 | 6.96 | 6.63 | 7.66 | 5.73 | 5.86 | 6.60 | 6.71 | 0.65 | 100 | 1.12E−02 | −1.64 | 3.1 |
| hsa-miR-494 | hsa-miR61_st2 | 6.79 | 8.48 | 8.35 | 7.88 | 0.94 | 100 | 6.83 | 6.55 | 6.85 | 6.43 | 6.38 | 7.10 | 5.40 | 5.79 | 6.89 | 6.47 | 0.55 | 89 | 8.75E−03 | −1.41 | 2.7 |
| hsa-asg- | hsa-asg-13205_st1 | 7.15 | 8.56 | 8.28 | 8.00 | 0.75 | 100 | 7.02 | 6.39 | 7.09 | 7.51 | 6.90 | 6.04 | 6.76 | 5.59 | 4.40 | 6.41 | 0.95 | 67 | 2.62E−02 | −1.59 | 3.0 |
| 13205 | | | | | | | | | | | | | | | | | | | | | | |
| hsa-miR-9* | hsa-miR-9-_st2 | 5.75 | 7.41 | 8.33 | 7.16 | 1.31 | 100 | 6.20 | 6.10 | 5.57 | 6.11 | 5.41 | 5.87 | 4.94 | 4.73 | 5.23 | 5.57 | 0.54 | 44 | 1.03E−02 | −1.59 | 3.0 |
| hsa-miR-497 | hsa-miR-497_st1 | 7.86 | 8.79 | 9.18 | 8.61 | 0.68 | 100 | 7.43 | 7.60 | 6.23 | 8.75 | 7.86 | 6.49 | 6.51 | 5.62 | 6.69 | 7.02 | 0.96 | 33 | 2.64E−02 | −1.59 | 3.0 |
| hsa-miR-497 | hsa-miR43_st1 | 8.44 | 9.72 | 10.0 | 9.39 | 0.83 | 100 | 8.20 | 8.56 | 7.51 | 9.37 | 8.88 | 7.78 | 7.45 | 7.13 | 7.83 | 8.08 | 0.74 | 89 | 2.63E−02 | −1.31 | 2.5 |
| hsa-miR-212 | hsa-miR-212_st2 | 6.34 | 6.73 | 7.74 | 6.93 | 0.72 | 100 | 6.27 | 5.73 | 6.17 | 5.72 | 5.17 | 5.11 | 4.59 | 4.98 | 4.76 | 5.39 | 0.61 | 11 | 4.31E−03 | −1.55 | 2.9 |
| hsa-miR-132 | hsa-miR-132_st1 | 9.30 | 9.22 | 11.0 | 9.87 | 1.05 | 100 | 9.72 | 8.56 | 8.33 | 8.35 | 8.59 | 8.08 | 8.02 | 8.44 | 6.88 | 8.33 | 0.74 | 89 | 1.70E−02 | −1.54 | 2.9 |
| hsa-miR-222 | hsa-miR-222_st2 | 10.7 | 11.1 | 11.9 | 11.2 | 0.61 | 100 | 10.4 | 9.56 | 9.54 | 10.2 | 9.75 | 9.33 | 9.52 | 9.38 | 9.86 | 9.73 | 0.37 | 100 | 3.50E−04 | −1.52 | 2.9 |
| hsa-asg- | hsa-asg-12240_st1 | 5.21 | 5.17 | 5.69 | 5.36 | 0.29 | 100 | 4.17 | 3.16 | 3.91 | 4.08 | 4.89 | 2.69 | 3.05 | 4.41 | 4.40 | 3.86 | 0.73 | 0 | 7.31E−03 | −1.49 | 2.8 |
| 12240 | | | | | | | | | | | | | | | | | | | | | | |
| hsa-miR-194 | hsa-miR-194_st2 | 11.1 | 9.33 | 10.7 | 10.4 | 0.96 | 100 | 9.83 | 9.37 | 8.91 | 9.35 | 8.95 | 8.34 | 8.55 | 8.21 | 9.05 | 8.95 | 0.52 | 100 | 6.36E−03 | −1.46 | 2.7 |
| hsa-cand330 | hsa-cand330_st2 | 5.08 | 5.79 | 6.13 | 5.67 | 0.54 | 100 | 4.76 | 5.04 | 3.54 | 4.71 | 5.15 | 4.18 | 2.64 | 3.99 | 3.97 | 4.22 | 0.80 | 11 | 1.68E−02 | −1.45 | 2.7 |
| hsa-asg-191 | hsa-asg-191_st1 | 4.75 | 5.55 | 5.05 | 5.12 | 0.40 | 33 | 3.33 | 3.92 | 2.86 | 3.57 | 3.85 | 4.10 | 4.00 | 3.20 | 4.84 | 3.74 | 0.58 | 0 | 3.80E−03 | −1.38 | 2.6 |
| hsa-miR-574 | hsa-miR-574_st1 | 10.1 | 10.2 | 10.8 | 10.4 | 0.38 | 100 | 9.35 | 8.42 | 9.39 | 10.2 | 9.96 | 8.12 | 9.20 | 8.06 | 8.47 | 9.02 | 0.80 | 100 | 1.83E−02 | −1.37 | 2.6 |
| hsa-asg- | hsa-asg-14150_st1 | 6.92 | 8.37 | 8.14 | 7.81 | 0.78 | 67 | 7.05 | 6.35 | 7.01 | 7.73 | 6.67 | 5.80 | 5.79 | 5.15 | 6.39 | 6.44 | 0.78 | 11 | 2.52E−02 | −1.37 | 2.6 |
| 14150 | | | | | | | | | | | | | | | | | | | | | | |
| hsa-miR-215 | hsa-miR-215_st1 | 8.08 | 6.02 | 7.15 | 7.08 | 1.03 | 100 | 6.96 | 5.82 | 5.71 | 6.66 | 5.54 | 4.84 | 5.51 | 5.11 | 5.23 | 5.71 | 0.70 | 33 | 2.43E−02 | −1.37 | 2.6 |
| hsa-asg-7417 | hsa-asg-7417_st1 | 5.41 | 4.21 | 6.26 | 5.29 | 1.03 | 67 | 4.55 | 3.36 | 4.50 | 5.28 | 4.04 | 3.26 | 3.59 | 3.59 | 3.17 | 3.93 | 0.72 | 0 | 2.72E−02 | −1.36 | 2.6 |
| hsa-asg- | hsa-asg-11443_st1 | 3.74 | 5.55 | 4.14 | 4.48 | 0.95 | 33 | 4.17 | 3.64 | 2.86 | 2.69 | 3.54 | 2.69 | 3.40 | 2.78 | 2.33 | 3.12 | 0.59 | 0 | 1.33E−02 | −1.36 | 2.6 |
| 11443 | | | | | | | | | | | | | | | | | | | | | | |
| hsa-asg-7540 | hsa-asg-7540_st2 | 5.10 | 5.32 | 5.57 | 5.33 | 0.23 | 100 | 3.76 | 4.43 | 3.06 | 3.52 | 4.14 | 4.97 | 3.93 | 4.47 | 3.97 | 4.03 | 0.56 | 0 | 3.54E−03 | −1.30 | 2.5 |
| hsa-miR-9 | hsa-miR-9_st2 | 4.25 | 3.56 | 6.06 | 4.62 | 1.29 | 33 | 3.45 | 3.53 | 2.86 | 3.28 | 3.63 | 2.17 | 3.50 | 3.32 | 4.16 | 3.32 | 0.55 | 0 | 2.78E−02 | −1.30 | 2.5 |
| hsa-asg-8511 | hsa-asg-8511_st2 | 3.84 | 5.79 | 4.35 | 4.66 | 1.01 | 33 | 3.66 | 3.92 | 2.86 | 3.57 | 1.92 | 3.78 | 2.92 | 4.07 | 3.53 | 3.36 | 0.68 | 0 | 2.74E−02 | −1.30 | 2.5 |
| hsa-asg- | hsa-asg-10360_st1 | 3.99 | 4.94 | 4.93 | 4.62 | 0.55 | 33 | 3.45 | 3.42 | 3.06 | 4.66 | 3.72 | 3.26 | 3.17 | 2.45 | 2.74 | 3.32 | 0.63 | 0 | 1.02E−02 | −1.29 | 2.5 |
| 10360 | | | | | | | | | | | | | | | | | | | | | | |
| hsa-asg-8380 | hsa-asg-8380_st2 | 4.70 | 5.08 | 6.11 | 5.30 | 0.73 | 100 | 4.17 | 3.42 | 3.91 | 5.56 | 4.58 | 4.18 | 2.78 | 2.93 | 4.54 | 4.01 | 0.87 | 0 | 4.49E−02 | −1.29 | 2.4 |
| hsa-miR-214 | hsa-miR-214_st1 | 10.4 | 10.9 | 11.3 | 10.9 | 0.49 | 100 | 9.76 | 9.55 | 9.76 | 10.9 | 10.3 | 9.93 | 9.27 | 8.44 | 8.52 | 9.62 | 0.81 | 100 | 2.97E−02 | −1.28 | 2.4 |
| hsa-asg- | hsa-asg-10291_st2 | 4.49 | 6.07 | 4.97 | 5.18 | 0.81 | 33 | 4.17 | 4.58 | 4.07 | 4.04 | 3.63 | 2.99 | 3.85 | 3.49 | 4.28 | 3.90 | 0.47 | 0 | 6.30E−03 | −1.28 | 2.4 |
| 10291 | | | | | | | | | | | | | | | | | | | | | | |
| hsa-asg- | hsa-asg-10883_st1 | 8.02 | 9.06 | 8.16 | 8.41 | 0.56 | 100 | 7.64 | 7.18 | 7.34 | 8.22 | 8.03 | 6.58 | 6.97 | 5.74 | 6.63 | 7.15 | 0.78 | 89 | 2.79E−02 | −1.26 | 2.4 |
| 10883 | | | | | | | | | | | | | | | | | | | | | | |
| hsa-miR-99b | hsa-miR-99b_st1 | 11.4 | 11.3 | 12.4 | 11.7 | 0.59 | 100 | 11.0 | 10.5 | 10.5 | 11.4 | 11.1 | 10.1 | 10.1 | 9.52 | 10.3 | 10.5 | 0.59 | 100 | 1.12E−02 | −1.22 | 2.3 |
| hsa-miR-99b | hsa-asg-14196_st2 | 11.5 | 11.3 | 12.5 | 11.8 | 0.64 | 100 | 11.2 | 10.6 | 10.2 | 11.6 | 11.3 | 10.3 | 10.3 | 9.55 | 10.5 | 10.7 | 0.65 | 100 | 2.85E−02 | −1.10 | 2.1 |
| hsa-asg- | hsa-asg-14048_st1 | 4.87 | 5.57 | 6.07 | 5.50 | 0.60 | 67 | 4.43 | 4.95 | 3.54 | 3.63 | 5.03 | 3.26 | 4.59 | 5.15 | 4.07 | 4.29 | 0.70 | 0 | 2.44E−02 | −1.21 | 2.3 |
| 14048 | | | | | | | | | | | | | | | | | | | | | | |
| hsa-asg-360 | hsa-asg-360_st2 | 4.99 | 5.62 | 5.84 | 5.48 | 0.44 | 67 | 4.49 | 3.53 | 4.02 | 5.45 | 4.77 | 3.64 | 4.00 | 4.35 | 4.32 | 4.28 | 0.59 | 0 | 9.57E−03 | −1.20 | 2.3 |
| hsa-asg-3821 | hsa-asg-3821_st2 | 4.77 | 5.89 | 5.58 | 5.41 | 0.58 | 33 | 3.45 | 5.19 | 3.39 | 4.63 | 3.10 | 5.11 | 4.20 | 4.14 | 4.78 | 4.22 | 0.77 | 0 | 3.59E−02 | −1.19 | 2.3 |
| hsa-asg- | hsa-asg-13308_st2 | 10.3 | 10.0 | 11.4 | 10.6 | 0.72 | 100 | 10.5 | 9.46 | 9.58 | 9.81 | 9.17 | 8.63 | 9.51 | 8.96 | 9.11 | 9.43 | 0.56 | 100 | 1.33E−02 | −1.19 | 2.3 |
| 13308 | | | | | | | | | | | | | | | | | | | | | | |
| hsa-asg-7465 | hsa-asg-7465_st2 | 6.09 | 5.75 | 6.38 | 6.07 | 0.31 | 100 | 4.66 | 4.37 | 4.02 | 6.18 | 5.09 | 4.21 | 5.16 | 5.22 | 5.05 | 4.88 | 0.66 | 11 | 1.43E−02 | −1.19 | 2.3 |
| hsa-asg- | hsa-asg-13279_st1 | 7.84 | 8.38 | 9.03 | 8.42 | 0.60 | 100 | 7.58 | 7.47 | 7.55 | 8.17 | 7.24 | 6.59 | 6.87 | 7.00 | 6.68 | 7.24 | 0.51 | 100 | 7.21E−03 | −1.18 | 2.3 |
| 13279 | | | | | | | | | | | | | | | | | | | | | | |
| hsa-asg- | hsa-asg-13270_st2 | 4.41 | 6.39 | 4.64 | 5.15 | 1.09 | 33 | 3.93 | 3.83 | 3.79 | 4.97 | 4.60 | 4.31 | 3.50 | 3.83 | 3.09 | 3.98 | 0.57 | 0 | 3.26E−02 | −1.16 | 2.2 |
| 13270 | | | | | | | | | | | | | | | | | | | | | | |
| hsa-asg- | hsa-asg-11883_st1 | 6.51 | 7.56 | 7.65 | 7.24 | 0.63 | 100 | 5.92 | 6.06 | 6.67 | 6.74 | 6.18 | 6.02 | 6.12 | 4.58 | 6.44 | 6.08 | 0.63 | 78 | 2.08E−02 | −1.16 | 2.2 |
| 11883 | | | | | | | | | | | | | | | | | | | | | | |
| hsa-asg-4366 | hsa-asg-4366_st1 | 3.81 | 4.21 | 4.74 | 4.25 | 0.47 | 33 | 3.45 | 3.16 | 3.23 | 3.82 | 3.10 | 2.85 | 2.15 | 2.62 | 3.53 | 3.10 | 0.51 | 0 | 6.09E−03 | −1.15 | 2.2 |
| hsa-asg-3251 | hsa-asg-3251_st1 | 4.99 | 3.73 | 5.37 | 4.70 | 0.86 | 67 | 4.24 | 4.16 | 4.02 | 2.85 | 3.54 | 3.95 | 2.92 | 3.07 | 3.25 | 3.56 | 0.55 | 0 | 2.07E−02 | −1.14 | 2.2 |
| hsa-miR-192 | hsa-miR-192_st2 | 11.4 | 9.87 | 11.0 | 10.8 | 0.84 | 100 | 10.8 | 9.87 | 10.1 | 10.0 | 9.58 | 8.72 | 9.33 | 8.80 | 9.65 | 9.66 | 0.66 | 100 | 3.45E−02 | −1.14 | 2.2 |
| hsa-miR-331 | hsa-miR-331_st2 | 8.22 | 8.80 | 9.96 | 8.99 | 0.88 | 100 | 9.04 | 7.57 | 8.35 | 8.79 | 7.69 | 7.09 | 7.70 | 7.28 | 7.20 | 7.86 | 0.71 | 100 | 4.56E−02 | −1.14 | 2.2 |
| hsa-miR-27b | hsa-miR-27b_st1 | 13.0 | 13.4 | 13.7 | 13.4 | 0.31 | 100 | 12.57 | 12.35 | 12.07 | 13.29 | 12.86 | 11.94 | 11.94 | 11.06 | 12.51 | 12.29 | 0.64 | 100 | 1.65E−02 | −1.13 | 2.2 |
| hsa-asg- | hsa-asg-13797_st2 | 4.04 | 5.53 | 3.99 | 4.52 | 0.87 | 33 | 2.43 | 3.53 | 2.86 | 3.01 | 3.44 | 3.69 | 2.92 | 4.58 | 4.16 | 3.40 | 0.68 | 0 | 4.22E−02 | −1.12 | 2.2 |
| 13797 | | | | | | | | | | | | | | | | | | | | | | |
| hsa-miR-324- | hsa-miR-324- | 8.04 | 9.68 | 9.45 | 9.06 | 0.89 | 100 | 7.92 | 8.13 | 8.33 | 8.27 | 7.80 | 7.42 | 7.82 | 7.87 | 7.98 | 7.95 | 0.27 | 100 | 5.23E−03 | −1.11 | 2.2 |
| 5p | 5p_st1 | | | | | | | | | | | | | | | | | | | | | |
| hsa-asg- | hsa-asg-10674_st1 | 5.12 | 6.16 | 6.57 | 5.95 | 0.75 | 67 | 4.31 | 4.49 | 5.24 | 5.42 | 5.21 | 5.30 | 4.73 | 4.35 | 4.67 | 4.86 | 0.44 | 0 | 9.72E−03 | −1.10 | 2.1 |
| 10674 | | | | | | | | | | | | | | | | | | | | | | |
| hsa-asg- | hsa-asg-14233_st1 | 9.72 | 10.5 | 10.7 | 10.3 | 0.52 | 100 | 9.45 | 9.26 | 9.23 | 10.1 | 9.44 | 8.89 | 9.05 | 8.87 | 8.89 | 9.25 | 0.41 | 100 | 4.07E−03 | −1.07 | 2.1 |
| 14233 | | | | | | | | | | | | | | | | | | | | | | |
| hsa-asg-5304 | hsa-asg-5304_st1 | 10.2 | 10.1 | 11.4 | 10.6 | 0.68 | 100 | 10.6 | 9.48 | 9.75 | 10.1 | 9.40 | 8.81 | 9.58 | 9.07 | 9.15 | 9.56 | 0.56 | 100 | 2.09E−02 | −1.07 | 2.1 |
| hsa-miR-409- | hsa-miR-409- | 6.25 | 6.89 | 6.95 | 6.69 | 0.39 | 100 | 5.14 | 5.04 | 6.67 | 6.09 | 6.11 | 5.17 | 5.92 | 5.45 | 5.27 | 5.65 | 0.57 | 44 | 1.53E−02 | −1.04 | 2.1 |
| 5p | 5p_st1 | | | | | | | | | | | | | | | | | | | | | |
| hsa-asg-3998 | hsa-asg-3998_st1 | 9.19 | 9.86 | 10.3 | 9.81 | 0.60 | 100 | 8.63 | 8.58 | 8.70 | 9.41 | 8.77 | 8.37 | 9.21 | 8.76 | 8.49 | 8.77 | 0.34 | 100 | 3.11E−03 | −1.04 | 2.1 |
| hsa-asg- | Has-asg-12515_st2 | 3.78 | 5.53 | 5.79 | 5.03 | 1.10 | 67 | 4.02 | 4.30 | 3.06 | 4.12 | 4.60 | 4.37 | 3.68 | 4.14 | 3.77 | 4.01 | 0.46 | 0 | 3.68E−02 | −1.02 | 2.0 |
| 12515 | | | | | | | | | | | | | | | | | | | | | | |
| hsa-miR-30e- | hsa-miR-30e- | 10.0 | 10.6 | 11.0 | 10.5 | 0.54 | 100 | 10.4 | 9.64 | 9.71 | 10.5 | 9.81 | 9.23 | 9.23 | 8.15 | 9.50 | 9.58 | 0.70 | 100 | 4.93E−02 | −1.00 | 2.0 |
| 5p | 5p_st2 | | | | | | | | | | | | | | | | | | | | | |

SD, standard deviation;
%, percentage of samples expressing miRNA above background levels;
Log2Diff, difference in VSN-transformed expression bewteen PRO and LNneg samples.

### Example 25

### miRNAs Differentally Expressed Between Normal Lung Tissue and Normal Lymph Nodes

[0313] To identify miRNAs that may be useful markers for metastasis of cancerous lung cells to lymph nodes, the inventors identified miRNAs that are expressed at significantly higher levels in normal lung tissue than in cancer-negative lymph nodes.

[0314] Total RNA, purified from three separate normal human lung tissue samples (FirstChoice® Human Lung Total RNA, cat. no. AM7968; Ambion, Austin, Tex., USA) and from nine normal human lymph node samples (FirstChoice® Human Lymph Node Total RNA, cat. no. AM7894; Ambion, Austin, Tex., USA) was purchased from Ambion. miRNA purification and labeling and microarray expression analyses were performed as described above in Example 2.

[0315] The inventors identified 182 miRNAs (72 verified, 110 predicted) with significant differential expression between normal lung and normal lymph nodes (log 2Diff lung vs LN neg≧1 and p-value<0.05) (Table 24). Among the verified miRNAs, hsa-miR-375 had an average expression level over 100-fold higher in lung tissue samples; hsa-miR-429, -205 and -203) had average expression levels that were over 50-fold higher in lung samples; 6 miRNAs (hsa-miR-34c, -200a, -200b, -200c, -184 and -141) had average expression levels that were between 20- and 50-fold higher in lung samples; 4 miRNAs (hsa-miR-449, -605, -338 and -187) had average expression levels that were between 10- and 20-fold higher in lung samples; and 11 miRNAs had average expression levels that were between 5- and 10-fold higher in lung samples compared to normal lymph nodes. Among the predicted miRNAs, hsa-asg-13231_st1 had an average expression level that was over 50-fold higher in lung samples; hsa-asg-4439-st2 and hsa-cand150_st2 had average expression levels that were between 25- and 45-fold higher in lung samples; 6 miRNAs had average expression levels that were between 10- and 20-fold higher in lung samples; and 18 miRNAs had average expression levels that were between 5- and 10-fold higher in lung tissue samples compared to normal lymph nodes.

TABLE 24
MicroRNAs Differentially Expressed Between Normal Lung Samples (LUN) and
Cancer-Negative Lymph Node Samples (LNneg) from Patients.

| LUN | | | | | | | | LNneg | | | | | | | | | | | | | | |
|---|---|---|---|---|---|---|---|---|---|---|---|---|---|---|---|---|---|---|---|---|---|---|
| Micro RNA | Probe ID | 1 | 2 | 3 | M | SD | % | 1 | 2 | 3 | 4 | 5 | 6 | 7 | 8 | 9 | M | SD | % | ttest | log2Diff | Fold |
| hsa-miR-375 | hsa-miR-375_st1 | 12.1 | 10.6 | 10.2 | 11.0 | 0.99 | 100 | 5.96 | 4.93 | 6.23 | 2.85 | 2.97 | 3.69 | 0.99 | 4.63 | 6.39 | 4.29 | 1.82 | 0 | 1.32E−04 | 6.75 | 107 |
| hsa-miR-429 | hsa-miR-429_st1 | 8.79 | 9.71 | 8.77 | 9.09 | 0.54 | 100 | 3.45 | 1.54 | 3.67 | 2.13 | 2.37 | 2.69 | 2.32 | 2.45 | 5.39 | 2.89 | 1.14 | 0 | 4.61E−06 | 6.20 | 73.7 |
| hsa-miR-205 | hsa-miR-205_st1 | 9.96 | 11.9 | 10.5 | 10.8 | 1.01 | 100 | 2.93 | 5.91 | 5.64 | 2.03 | 3.59 | 6.11 | 3.40 | 5.32 | 7.76 | 4.74 | 1.85 | 33 | 3.36E−04 | 6.08 | 67.8 |
| hsa-miR-203 | hsa-miR-203_st2 | 12.1 | 12.7 | 12.8 | 12.5 | 0.37 | 100 | 7.33 | 5.89 | 7.21 | 8.24 | 6.45 | 5.41 | 5.19 | 6.07 | 9.36 | 6.79 | 1.37 | 78 | 3.82E−05 | 5.76 | 54.3 |
| hsa-asg-13231 | hsa-asg-13231_st1 | 9.35 | 9.39 | 9.03 | 9.26 | 0.20 | 100 | 3.93 | 4.16 | 4.21 | 4.46 | 2.97 | 3.43 | 1.79 | 2.08 | 4.47 | 3.50 | 1.01 | 0 | 2.59E−06 | 5.76 | 54.2 |
| hsa-asg-4439 | hsa-asg-4439_st2 | 8.99 | 8.74 | 8.50 | 8.74 | 0.25 | 100 | 3.85 | 4.37 | 3.23 | 2.69 | 1.64 | 3.69 | 2.78 | 3.74 | 4.07 | 3.34 | 0.85 | 0 | 9.38E−07 | 5.40 | 42.3 |
| hsa-miR-34c | hsa-miR-34c_st2 | 7.45 | 10.3 | 9.17 | 8.99 | 1.46 | 100 | 1.85 | 2.54 | 3.54 | 3.68 | 3.63 | 3.06 | 3.50 | 3.74 | 6.85 | 3.60 | 1.37 | 11 | 1.70E−04 | 5.39 | 42.0 |
| hsa-miR-200a | hsa-miR-200a_st2 | 10.3 | 10.7 | 10.4 | 10.5 | 0.20 | 100 | 6.27 | 5.08 | 6.49 | 5.72 | 5.29 | 4.60 | 4.07 | 4.78 | 7.78 | 5.56 | 1.14 | 67 | 2.60E−05 | 4.97 | 31.4 |
| hsa-miR-200b | hsa-miR-200b_st1 | 12.0 | 12.9 | 12.6 | 12.5 | 0.45 | 100 | 7.62 | 7.80 | 8.90 | 6.69 | 6.82 | 6.87 | 6.51 | 7.65 | 10.4 | 7.70 | 1.26 | 100 | 8.48E−05 | 4.85 | 28.9 |
| hsa-miR-200c | hsa-miR-200c_st1 | 13.6 | 13.9 | 13.5 | 13.7 | 0.22 | 100 | 9.60 | 8.84 | 10.3 | 8.18 | 8.15 | 8.14 | 7.98 | 8.89 | 11.5 | 9.07 | 1.21 | 100 | 7.06E−05 | 4.68 | 25.7 |
| hsa-cand150 | hsa-cand150_st2 | 8.86 | 8.25 | 7.79 | 8.30 | 0.53 | 100 | 6.27 | 3.74 | 2.43 | 2.51 | 3.16 | 3.48 | 2.64 | 3.99 | 4.47 | 3.63 | 1.21 | 11 | 8.71E−05 | 4.67 | 25.4 |
| hsa-miR-184 | hsa-miR-184_st1 | 8.09 | 9.87 | 7.69 | 8.55 | 1.16 | 100 | 5.51 | 4.55 | 4.12 | 4.30 | 3.93 | 5.17 | 1.60 | 3.83 | 4.16 | 4.13 | 1.10 | 11 | 1.39E−04 | 4.42 | 21.5 |
| hsa-miR-141 | hsa-miR-141_st1 | 8.32 | 9.47 | 7.96 | 8.58 | 0.79 | 100 | 5.07 | 3.83 | 4.93 | 4.43 | 4.39 | 2.85 | 3.85 | 3.83 | 4.54 | 4.19 | 0.68 | 0 | 2.90E−06 | 4.39 | 21.0 |
| hsa-miR-449 | hsa-miR-449_st2 | 5.59 | 8.67 | 6.12 | 6.79 | 1.64 | 67 | 2.61 | 1.54 | 4.54 | 3.08 | 3.63 | 1.68 | 0.91 | 1.68 | 4.73 | 2.71 | 1.37 | 0 | 1.63E−03 | 4.08 | 16.9 |
| hsa-asg-9269 | hsa-asg-9269_st2 | 6.08 | 8.53 | 6.25 | 6.95 | 1.37 | 100 | 2.61 | 2.54 | 4.68 | 2.93 | 2.61 | 2.69 | 2.64 | 2.27 | 3.97 | 2.99 | 0.80 | 0 | 8.55E−05 | 3.96 | 15.5 |
| hsa-miR-605 | hsa-miR-605_st1 | 6.58 | 6.82 | 6.09 | 6.50 | 0.37 | 100 | 2.61 | 2.16 | 3.06 | 0.75 | 1.74 | 2.17 | 2.92 | 3.07 | 4.47 | 2.55 | 1.03 | 0 | 8.83E−05 | 3.95 | 15.4 |
| hsa-miR-338 | hsa-miR-338_st1 | 7.63 | 8.50 | 8.18 | 8.10 | 0.44 | 100 | 5.11 | 4.08 | 5.57 | 4.86 | 4.04 | 2.17 | 4.78 | 3.44 | 4.89 | 4.33 | 1.03 | 11 | 1.34E−04 | 3.78 | 13.7 |
| hsa-asg-4438 | hsa-asg-4438_st2 | 8.71 | 8.45 | 7.88 | 8.35 | 0.42 | 100 | 4.55 | 4.55 | 5.04 | 4.55 | 4.14 | 4.55 | 4.20 | 4.83 | 5.35 | 4.64 | 0.38 | 0 | 5.62E−08 | 3.71 | 13.1 |
| hsa-miR-187 | hsa-miR-187_st1 | 7.12 | 7.40 | 6.69 | 7.07 | 0.36 | 100 | 4.76 | 2.79 | 2.76 | 3.77 | 3.22 | 3.37 | 3.05 | 3.38 | 3.17 | 3.37 | 0.61 | 0 | 1.90E−06 | 3.70 | 13.0 |
| hsa-asg-8428 | hsa-asg-8428_st2 | 4.99 | 6.02 | 5.36 | 5.46 | 0.52 | 100 | 2.25 | 1.96 | 2.66 | 2.03 | 2.53 | 1.01 | 0.02 | 2.17 | 1.62 | 1.80 | 0.83 | 0 | 3.58E−05 | 3.65 | 12.6 |
| hsa-asg-10131 | hsa-asg-10131_st2 | 6.99 | 7.32 | 6.35 | 6.89 | 0.49 | 100 | 3.33 | 3.16 | 3.54 | 2.51 | 2.53 | 3.26 | 2.64 | 3.20 | 5.09 | 3.25 | 0.78 | 0 | 2.27E−05 | 3.64 | 12.4 |
| hsa-asg-1794 | hsa-asg-1794_st1 | 4.95 | 5.74 | 5.43 | 5.37 | 0.40 | 67 | 1.85 | 1.96 | 2.66 | 1.72 | 2.19 | 1.01 | 2.15 | 1.48 | 2.92 | 1.99 | 0.58 | 0 | 3.21E−06 | 3.38 | 10.4 |
| hsa-asg-7637 | hsa-asg-7637_st2 | 7.58 | 6.98 | 6.85 | 7.14 | 0.39 | 100 | 3.66 | 2.54 | 4.47 | 3.46 | 3.93 | 4.03 | 3.29 | 3.64 | 5.27 | 3.81 | 0.76 | 0 | 3.36E−05 | 3.33 | 10.1 |
| hsa-miR-449b | hsa-miR-449b_st1 | 5.32 | 8.42 | 5.83 | 6.52 | 1.66 | 100 | 1.85 | 3.29 | 4.47 | 2.51 | 3.59 | 2.85 | 2.78 | 3.20 | 4.32 | 3.21 | 0.84 | 0 | 8.14E−04 | 3.32 | 10.0 |
| hsa-asg-11715 | hsa-asg-11715_st2 | 4.77 | 5.25 | 5.56 | 5.20 | 0.40 | 67 | 1.85 | 2.36 | 2.18 | 1.51 | 2.11 | 1.78 | 0.62 | 1.48 | 3.39 | 1.92 | 0.75 | 0 | 3.52E−05 | 3.28 | 9.7 |
| hsa-asg-1296 | hsa-asg-1296_st1 | 6.07 | 7.42 | 6.09 | 6.53 | 0.77 | 100 | 3.07 | 2.54 | 4.81 | 2.42 | 2.53 | 2.77 | 3.17 | 3.91 | 4.16 | 3.27 | 0.84 | 0 | 1.50E−04 | 3.26 | 9.6 |
| hsa-asg-3822 | hsa-asg-3822_st2 | 5.83 | 6.16 | 5.90 | 5.96 | 0.18 | 100 | 2.05 | 3.02 | 3.67 | 2.03 | 2.45 | 2.17 | 1.60 | 2.93 | 4.78 | 2.75 | 0.99 | 0 | 2.89E−04 | 3.22 | 9.3 |
| hsa-asg-13135 | hsa-asg-13135_st1 | 8.53 | 7.74 | 8.74 | 8.34 | 0.53 | 100 | 5.62 | 5.67 | 5.24 | 4.91 | 4.79 | 4.75 | 5.16 | 4.47 | 5.60 | 5.13 | 0.43 | 22 | 9.42E−07 | 3.21 | 9.2 |
| hsa-asg-13705 | hsa-asg-13705_st1 | 5.50 | 5.74 | 5.17 | 5.47 | 0.28 | 100 | 1.65 | 0.95 | 3.79 | 2.33 | 2.69 | 2.35 | 0.35 | 3.20 | 3.25 | 2.29 | 1.12 | 0 | 8.23E−04 | 3.19 | 9.1 |
| Has-cand26 | hsa-cand26_st2 | 8.22 | 7.55 | 8.69 | 8.15 | 0.57 | 100 | 6.12 | 5.61 | 6.03 | 4.08 | 3.68 | 4.75 | 5.29 | 4.07 | 5.46 | 5.01 | 0.90 | 22 | 2.39E−04 | 3.14 | 8.8 |
| hsa-asg-13997 | hsa-asg-13997_st2 | 5.70 | 4.89 | 6.42 | 5.67 | 0.77 | 100 | 3.07 | 3.29 | 2.18 | 3.01 | 2.19 | 2.35 | 1.25 | 3.20 | 2.33 | 2.54 | 0.66 | 0 | 4.43E−05 | 3.13 | 8.7 |
| hsa-asg-10247 | hsa-asg-10247_st1 | 5.45 | 5.93 | 5.36 | 5.58 | 0.31 | 100 | 2.78 | 2.16 | 4.02 | 1.72 | 2.19 | 2.35 | 0.35 | 3.20 | 3.97 | 2.53 | 1.14 | 0 | 1.26E−03 | 3.05 | 8.3 |
| hsa-miR-96 | hsa-miR-96_st1 | 5.52 | 7.05 | 5.89 | 6.15 | 0.80 | 100 | 4.99 | 3.42 | 3.06 | 3.01 | 4.11 | 2.85 | 3.05 | 1.88 | 3.09 | 3.27 | 0.86 | 11 | 4.79E−04 | 2.88 | 7.4 |
| hsa-miR-183 | hsa-miR-183_st1 | 9.72 | 10.4 | 9.06 | 9.76 | 0.71 | 100 | 7.66 | 6.76 | 6.71 | 7.93 | 7.56 | 5.83 | 7.52 | 6.32 | 6.65 | 6.99 | 0.70 | 89 | 1.58E−04 | 2.76 | 6.8 |
| hsa-miR-34b | hsa-miR-34b_st2 | 6.69 | 9.66 | 8.25 | 8.20 | 1.48 | 100 | 4.76 | 5.12 | 6.41 | 6.24 | 5.05 | 5.24 | 4.73 | 5.11 | 6.41 | 5.45 | 0.70 | 56 | 1.10E−03 | 2.75 | 6.7 |
| hsa-asg-10881 | hsa-asg-10881_st1 | 7.85 | 7.70 | 8.28 | 7.94 | 0.30 | 100 | 5.73 | 5.04 | 6.06 | 5.43 | 4.79 | 5.46 | 4.20 | 5.04 | 5.23 | 5.22 | 0.54 | 22 | 1.04E−05 | 2.72 | 6.6 |
| hsa-miR-551b | hsa-miR167_st2 | 6.03 | 7.60 | 7.65 | 7.09 | 0.92 | 100 | 5.25 | 4.43 | 3.79 | 5.85 | 3.39 | 4.03 | 4.82 | 3.54 | 4.32 | 4.38 | 0.81 | 22 | 6.40E−04 | 2.71 | 6.6 |
| hsa-miR-551b | hsa-miR-551b_st1 | 5.40 | 7.26 | 7.37 | 6.68 | 1.11 | 100 | 4.81 | 4.86 | 4.87 | 4.76 | 4.00 | 2.69 | 4.14 | 2.93 | 4.40 | 4.16 | 0.83 | 0 | 1.76E−03 | 2.52 | 5.7 |
| hsa-asg-14238 | hsa-asg-14238_st1 | 5.32 | 7.67 | 5.36 | 6.12 | 1.35 | 100 | 3.76 | 4.61 | 3.79 | 3.28 | 4.24 | 2.99 | 3.85 | 1.48 | 2.74 | 3.42 | 0.93 | 0 | 2.76E−03 | 2.70 | 6.5 |
| hsa-miR-576 | hsa-miR-576_st2 | 4.02 | 5.96 | 5.09 | 5.02 | 0.97 | 67 | 2.25 | 2.87 | 3.06 | 1.72 | 2.01 | 1.97 | 1.97 | 2.08 | 3.09 | 2.34 | 0.53 | 0 | 8.93E−05 | 2.69 | 6.4 |
| hsa-miR-200a* | hsa-miR-200a-_st2 | 5.09 | 5.49 | 5.58 | 5.39 | 0.26 | 100 | 3.07 | 2.87 | 2.18 | 3.91 | 2.61 | 1.78 | 2.15 | 3.20 | 2.92 | 2.74 | 0.65 | 0 | 5.32E−05 | 2.64 | 6.2 |
| hsa-asg-5119 | hsa-asg-5119_st1 | 4.99 | 5.42 | 5.09 | 5.17 | 0.23 | 67 | 2.43 | 2.71 | 1.92 | 1.93 | 2.01 | 2.53 | 2.92 | 2.62 | 3.65 | 2.53 | 0.55 | 0 | 1.42E−05 | 2.64 | 6.2 |
| hsa-miR-582 | hsa-miR-582_st1 | 6.79 | 7.85 | 6.79 | 7.14 | 0.61 | 100 | 5.85 | 2.16 | 4.54 | 5.96 | 4.89 | 4.10 | 4.07 | 4.35 | 4.67 | 4.51 | 1.12 | 22 | 3.41E−03 | 2.63 | 6.2 |
| hsa-miR-493-5p | hsa-miR-493-5p_st1 | 6.59 | 7.74 | 7.44 | 7.26 | 0.59 | 100 | 4.37 | 3.83 | 6.88 | 6.18 | 6.33 | 3.69 | 4.38 | 1.88 | 4.60 | 4.68 | 1.56 | 33 | 2.19E−02 | 2.57 | 5.9 |
| hsa-asg-4219 | hsa-asg-4219_st1 | 4.99 | 5.82 | 4.23 | 5.01 | 0.79 | 33 | 3.45 | 1.75 | 1.66 | 1.51 | 2.28 | 1.78 | 2.92 | 2.78 | 3.97 | 2.46 | 0.87 | 0 | 1.21E−03 | 2.56 | 5.9 |
| hsa-asg-11380 | hsa-asg-11380_st2 | 4.85 | 5.22 | 5.03 | 5.03 | 0.19 | 33 | 2.93 | 1.75 | 3.06 | 2.51 | 2.19 | 1.97 | 2.48 | 2.27 | 3.09 | 2.47 | 0.48 | 0 | 5.01E−06 | 2.56 | 5.9 |
| hsa-miR-218 | hsa-miR-218_st2 | 10.7 | 11.5 | 11.7 | 11.3 | 0.51 | 100 | 9.62 | 9.27 | 8.82 | 9.68 | 9.16 | 8.64 | 7.76 | 7.45 | 8.75 | 8.80 | 0.77 | 100 | 3.49E−04 | 2.55 | 5.9 |
| hsa-miR-189 | hsa-miR-189_st1 | 7.57 | 8.21 | 7.94 | 7.91 | 0.32 | 100 | 6.08 | 5.79 | 4.93 | 7.23 | 6.18 | 4.55 | 4.94 | 3.54 | 4.95 | 5.36 | 1.08 | 44 | 2.92E−03 | 2.55 | 5.9 |
| Has-cand852 | hsa-cand852_st2 | 5.02 | 5.25 | 5.45 | 5.24 | 0.22 | 67 | 3.07 | 1.96 | 2.86 | 3.01 | 2.28 | 2.69 | 2.92 | 2.08 | 3.53 | 2.71 | 0.51 | 0 | 1.06E−05 | 2.53 | 5.8 |
| hsa-asg-4978 | hsa-asg-4978_st2 | 4.73 | 5.10 | 5.20 | 5.01 | 0.25 | 33 | 1.65 | 2.87 | 2.86 | 1.72 | 2.01 | 1.97 | 2.78 | 2.62 | 4.16 | 2.52 | 0.79 | 0 | 3.74E−04 | 2.49 | 5.6 |
| hsa-asg-14172 | hsa-asg-14172_st1 | 5.55 | 6.90 | 7.47 | 6.64 | 0.99 | 67 | 5.07 | 2.71 | 4.47 | 5.45 | 4.81 | 2.77 | 3.59 | 3.74 | 5.18 | 4.20 | 1.03 | 0 | 5.08E−03 | 2.44 | 5.4 |
| hsa-asg-9980 | hsa-asg-9980_st1 | 6.73 | 5.69 | 6.64 | 6.35 | 0.58 | 100 | 5.18 | 4.49 | 4.02 | 1.72 | 3.39 | 2.85 | 3.85 | 5.08 | 4.67 | 3.92 | 1.12 | 11 | 5.50E−03 | 2.44 | 5.4 |
| hsa-asg-1596 | hsa-asg-1596_st2 | 6.68 | 6.62 | 6.66 | 6.66 | 0.03 | 100 | 4.43 | 5.12 | 4.02 | 3.21 | 4.39 | 4.18 | 4.14 | 4.21 | 4.40 | 4.23 | 0.50 | 0 | 9.61E−06 | 2.42 | 5.4 |
| hsa-miR-101 | hsa-miR-101_st1 | 6.93 | 8.55 | 7.91 | 7.80 | 0.81 | 100 | 7.18 | 6.53 | 4.21 | 5.98 | 6.52 | 4.70 | 4.86 | 4.35 | 5.09 | 5.49 | 1.08 | 44 | 7.42E−03 | 2.30 | 4.9 |
| hsa-asg-5205 | hsa-asg-5205_st1 | 10.0 | 8.36 | 9.60 | 9.32 | 0.86 | 100 | 8.03 | 7.79 | 5.04 | 7.50 | 8.30 | 6.93 | 6.69 | 7.60 | 5.39 | 7.03 | 1.15 | 44 | 1.06E−02 | 2.29 | 4.9 |
| hsa-asg-4915 | hsa-asg-4915_st1 | 4.02 | 5.42 | 6.14 | 5.19 | 1.08 | 33 | 2.43 | 3.83 | 2.18 | 2.60 | 3.63 | 2.92 | 2.78 | 2.08 | 4.47 | 2.99 | 0.81 | 0 | 3.59E−03 | 2.20 | 4.6 |
| hsa-asg-5996 | hsa-asg-5996_st2 | 10.0 | 7.31 | 9.24 | 8.88 | 1.42 | 33 | 8.10 | 7.67 | 5.28 | 7.68 | 8.03 | 7.00 | 6.23 | 6.39 | 3.77 | 6.68 | 1.44 | 0 | 4.50E−02 | 2.20 | 4.6 |
| hsa-asg-3912 | hsa-asg-3912_st1 | 3.66 | 5.42 | 4.23 | 4.44 | 0.90 | 33 | 1.65 | 2.54 | 2.86 | 1.61 | 2.19 | 1.19 | 2.92 | 2.17 | 3.53 | 2.30 | 0.74 | 0 | 2.03E−03 | 2.14 | 4.4 |
| hsa-cand710 | hsa-cand710_st2 | 10.0 | 8.29 | 9.23 | 9.18 | 0.87 | 100 | 8.30 | 7.44 | 5.89 | 7.66 | 8.25 | 7.44 | 6.15 | 7.29 | 5.09 | 7.06 | 1.10 | 44 | 1.31E−02 | 2.13 | 4.4 |
| hsa-asg-11361 | hsa-asg-11361_st2 | 5.50 | 6.02 | 5.09 | 5.54 | 0.47 | 100 | 2.78 | 3.53 | 3.39 | 3.28 | 3.63 | 3.37 | 3.85 | 2.62 | 4.32 | 3.42 | 0.52 | 0 | 9.36E−05 | 2.12 | 4.3 |
| hsa-asg-11160 | hsa-asg-11160_st2 | 4.94 | 5.86 | 5.27 | 5.36 | 0.47 | 67 | 2.78 | 3.16 | 3.39 | 3.08 | 2.90 | 2.69 | 2.48 | 3.54 | 5.14 | 3.24 | 0.79 | 0 | 1.51E−03 | 2.12 | 4.3 |
| hsa-miR-592 | hsa-miR-592_st1 | 3.95 | 3.86 | 7.39 | 5.07 | 2.01 | 33 | 4.31 | 2.54 | 2.86 | 3.15 | 1.83 | 1.78 | 3.05 | 2.62 | 4.54 | 2.96 | 0.96 | 0 | 2.91E−02 | 2.10 | 4.3 |
| hsa-asg-13908 | hsa-asg-13908_st2 | 3.95 | 5.39 | 4.76 | 4.70 | 0.72 | 33 | 2.05 | 2.54 | 3.67 | 2.51 | 1.46 | 2.85 | 2.64 | 2.45 | 3.77 | 2.66 | 0.72 | 0 | 1.70E−03 | 2.04 | 4.1 |
| hsa-asg-280 | hsa-asg-280_st1 | 4.51 | 5.39 | 5.20 | 5.04 | 0.46 | 67 | 3.21 | 2.71 | 4.47 | 2.13 | 2.53 | 2.17 | 1.79 | 3.44 | 4.54 | 3.00 | 1.00 | 0 | 7.52E−03 | 2.04 | 4.1 |
| hsa-miR-495 | hsa-miR-495_st1 | 7.02 | 7.60 | 7.26 | 7.29 | 0.29 | 100 | 6.02 | 4.81 | 6.97 | 6.26 | 6.32 | 4.43 | 5.16 | 2.45 | 4.89 | 5.26 | 1.35 | 56 | 3.05E−02 | 2.04 | 4.1 |
| hsa-asg-13205 | hsa-asg-13205_st1 | 7.86 | 9.04 | 8.39 | 8.43 | 0.59 | 100 | 7.02 | 6.39 | 7.09 | 7.51 | 6.90 | 6.04 | 6.76 | 5.59 | 4.40 | 6.41 | 0.95 | 67 | 6.78E−03 | 2.02 | 4.1 |
| hsa-asg-8174 | hsa-asg-8174_st1 | 5.18 | 5.84 | 4.76 | 5.26 | 0.55 | 67 | 3.33 | 4.08 | 2.86 | 3.01 | 2.90 | 3.26 | 2.78 | 2.78 | 4.16 | 3.24 | 0.53 | 0 | 2.15E−04 | 2.02 | 4.1 |
| hsa-asg-14015 | hsa-asg-14015_st1 | 7.26 | 5.06 | 6.93 | 6.42 | 1.19 | 67 | 5.11 | 5.32 | 5.30 | 5.02 | 5.43 | 4.55 | 3.59 | 2.70 | 2.83 | 4.43 | 1.10 | 0 | 2.31E−02 | 1.99 | 4.0 |
| hsa-miR-598 | hsa-miR-598_st2 | 7.22 | 7.80 | 7.67 | 7.56 | 0.30 | 100 | 6.71 | 5.98 | 5.89 | 6.87 | 5.97 | 5.59 | 5.59 | 3.07 | 5.05 | 5.64 | 1.11 | 56 | 1.65E−02 | 1.93 | 3.8 |
| hsa-asg-13077 | hsa-asg-13077_st1 | 7.94 | 5.22 | 6.91 | 6.69 | 1.37 | 100 | 5.98 | 5.12 | 3.23 | 5.27 | 6.03 | 5.05 | 4.54 | 3.91 | 3.97 | 4.79 | 0.95 | 44 | 2.20E−02 | 1.90 | 3.7 |
| hsa-miR-19a | hsa-miR-19a_st1 | 4.73 | 5.69 | 3.82 | 4.74 | 0.94 | 33 | 4.61 | 3.42 | 2.86 | 3.15 | 3.63 | 2.53 | 1.60 | 1.29 | 2.54 | 2.85 | 1.02 | 0 | 1.76E−02 | 1.90 | 3.7 |
| hsa-miR-182 | hsa-miR-182_st1 | 11.0 | 11.8 | 10.5 | 11.1 | 0.65 | 100 | 10.2 | 10.0 | 8.85 | 9.82 | 9.37 | 9.55 | 8.99 | 8.57 | 8.13 | 9.28 | 0.70 | 100 | 2.09E−03 | 1.89 | 3.7 |
| hsa-miR-18a | hsa-miR-18a_st1 | 6.70 | 8.28 | 7.25 | 7.41 | 0.80 | 100 | 5.78 | 6.02 | 7.10 | 5.97 | 4.53 | 4.14 | 5.69 | 5.67 | 4.89 | 5.53 | 0.89 | 44 | 9.06E−03 | 1.88 | 3.7 |
| hsa-miR-181a* | hsa-miR-213_st1 | 6.78 | 8.30 | 8.03 | 7.70 | 0.81 | 100 | 6.30 | 6.22 | 5.67 | 5.72 | 5.45 | 5.43 | 5.32 | 5.79 | 6.55 | 5.83 | 0.43 | 56 | 3.43E−04 | 1.88 | 3.7 |
| hsa-asg-14150 | hsa-asg-14150_st1 | 7.74 | 8.88 | 8.25 | 8.29 | 0.57 | 33 | 7.05 | 6.35 | 7.01 | 7.73 | 6.67 | 5.80 | 5.79 | 5.15 | 6.39 | 6.44 | 0.78 | 11 | 3.97E−03 | 1.85 | 3.6 |
| hsa-miR-487b | hsa-miR-487b_st2 | 6.70 | 7.79 | 7.84 | 7.44 | 0.64 | 100 | 6.06 | 5.84 | 6.97 | 6.90 | 6.25 | 5.40 | 4.90 | 3.74 | 4.40 | 5.61 | 1.10 | 67 | 2.30E−02 | 1.84 | 3.6 |
| hsa-miR-199b | hsa-miR-199b_st2 | 9.96 | 11.82 | 10.7 | 10.8 | 0.93 | 100 | 9.40 | 9.08 | 9.04 | 10.6 | 10.3 | 8.25 | 9.05 | 6.55 | 8.85 | 9.03 | 1.19 | 100 | 3.74E−02 | 1.83 | 3.6 |
| hsa-cand149 | hsa-cand149_st1 | 7.42 | 7.13 | 9.03 | 7.86 | 1.02 | 33 | 6.04 | 7.27 | 5.60 | 6.09 | 6.84 | 6.52 | 3.23 | 6.30 | 6.41 | 6.03 | 1.15 | 0 | 3.56E−02 | 1.83 | 3.6 |
| hsa-asg-5829 | hsa-asg-5829_st1 | 5.99 | 6.40 | 5.52 | 5.97 | 0.44 | 33 | 5.18 | 3.96 | 5.01 | 4.58 | 4.42 | 4.10 | 2.32 | 4.25 | 3.46 | 4.14 | 0.86 | 0 | 6.27E−03 | 1.83 | 3.5 |
| hsa-asg-922 | hsa-asg-922_st1 | 8.04 | 8.81 | 8.01 | 8.29 | 0.45 | 100 | 7.77 | 7.24 | 6.28 | 7.01 | 5.92 | 6.62 | 4.98 | 5.81 | 6.89 | 6.50 | 0.85 | 89 | 6.72E−03 | 1.78 | 3.4 |
| hsa-asg-13127 | hsa-asg-13127_st2 | 7.86 | 8.69 | 8.25 | 8.27 | 0.41 | 100 | 7.75 | 7.36 | 5.86 | 6.68 | 6.05 | 6.84 | 5.66 | 5.08 | 7.13 | 6.49 | 0.88 | 67 | 8.10E−03 | 1.78 | 3.4 |
| hsa-asg-8616 | hsa-asg-8616_st2 | 5.48 | 4.11 | 6.02 | 5.20 | 0.98 | 67 | 3.45 | 4.49 | 1.66 | 4.55 | 3.59 | 4.24 | 3.85 | 2.08 | 3.09 | 3.44 | 1.02 | 0 | 2.62E−02 | 1.76 | 3.4 |
| hsa-miR-135b | hsa-miR-135b_st2 | 3.66 | 5.86 | 3.52 | 4.35 | 1.32 | 33 | 1.45 | 2.71 | 2.43 | 2.85 | 2.37 | 3.13 | 3.29 | 2.27 | 2.92 | 2.60 | 0.55 | 0 | 6.77E−03 | 1.75 | 3.4 |
| hsa-miR-135b | hsa-cand78_st1 | 4.42 | 5.89 | 4.56 | 4.96 | 0.81 | 33 | 3.45 | 2.54 | 3.67 | 4.15 | 3.72 | 2.85 | 3.59 | 1.68 | 3.25 | 3.21 | 0.75 | 0 | 6.41E−03 | 1.74 | 3.3 |
| hsa-asg- | hsa-asg-10679_st2 | 4.14 | 6.26 | 5.23 | 5.21 | 1.06 | 33 | 4.09 | 3.02 | 3.67 | 4.76 | 3.39 | 2.69 | 3.17 | 3.32 | 3.09 | 3.47 | 0.63 | 0 | 5.22E−03 | 1.74 | 3.3 |
| 10679 | | | | | | | | | | | | | | | | | | | | | | |
| hsa-miR-489 | hsa-miR-489_st2 | 6.70 | 7.82 | 9.30 | 7.94 | 1.30 | 100 | 7.35 | 6.80 | 6.01 | 7.48 | 6.36 | 5.50 | 5.73 | 5.42 | 5.23 | 6.21 | 0.84 | 56 | 2.10E−02 | 1.73 | 3.3 |
| hsa-miR-181d | hsa-miR-181d_st1 | 9.83 | 10.3 | 10.0 | 10.0 | 0.24 | 100 | 9.13 | 7.83 | 8.91 | 8.93 | 7.59 | 7.96 | 8.28 | 8.21 | 8.02 | 8.32 | 0.54 | 100 | 3.96E−04 | 1.73 | 3.3 |
| hsa-miR-181d | hsa-asg-13508_st1 | 7.23 | 7.68 | 7.52 | 7.48 | 0.23 | 100 | 6.61 | 5.82 | 6.85 | 6.61 | 5.63 | 5.68 | 5.69 | 5.81 | 5.53 | 6.02 | 0.51 | 67 | 9.00E−04 | 1.45 | 2.7 |
| hsa-miR-181d | hsa-miR74_st1 | 9.52 | 10.0 | 9.80 | 9.78 | 0.26 | 100 | 8.97 | 8.22 | 8.99 | 8.80 | 8.02 | 8.25 | 8.10 | 8.17 | 7.88 | 8.38 | 0.42 | 100 | 3.44E−04 | 1.41 | 2.7 |
| hsa-asg- | hsa-asg-13230_st2 | 7.55 | 8.09 | 7.99 | 7.88 | 0.28 | 100 | 7.46 | 6.04 | 7.10 | 7.36 | 4.72 | 5.57 | 6.22 | 7.09 | 3.77 | 6.15 | 1.28 | 78 | 4.77E−02 | 1.73 | 3.3 |
| 13230 | | | | | | | | | | | | | | | | | | | | | | |
| hsa-miR-376a | hsa-miR-376a_st2 | 5.76 | 6.55 | 5.90 | 6.07 | 0.42 | 100 | 5.14 | 4.08 | 5.49 | 5.67 | 4.85 | 4.03 | 2.48 | 3.83 | 3.77 | 4.37 | 1.01 | 0 | 2.01E−02 | 1.70 | 3.3 |
| hsa-miR-376a | hsa-asg-10049_st1 | 5.32 | 7.02 | 6.40 | 6.25 | 0.86 | 100 | 5.03 | 4.91 | 6.09 | 5.56 | 5.35 | 4.10 | 3.85 | 4.14 | 4.67 | 4.85 | 0.74 | 11 | 2.14E−02 | 1.39 | 2.6 |
| hsa-asg- | hsa-asg-14048_st1 | 6.18 | 5.93 | 5.87 | 5.99 | 0.16 | 100 | 4.43 | 4.95 | 3.54 | 3.63 | 5.03 | 3.26 | 4.59 | 5.15 | 4.07 | 4.29 | 0.70 | 0 | 2.43E−03 | 1.70 | 3.2 |
| 14048 | | | | | | | | | | | | | | | | | | | | | | |
| hsa-asg- | hsa-asg-12690_st1 | 3.95 | 4.79 | 5.33 | 4.69 | 0.69 | 33 | 3.76 | 2.87 | 2.66 | 3.40 | 3.49 | 2.85 | 2.92 | 2.93 | 2.10 | 3.00 | 0.49 | 0 | 8.39E−04 | 1.69 | 3.2 |
| 12690 | | | | | | | | | | | | | | | | | | | | | | |
| hsa-miR-331 | hsa-asg-14205_st1 | 8.00 | 8.37 | 8.06 | 8.14 | 0.20 | 100 | 7.53 | 5.85 | 7.37 | 7.77 | 6.85 | 4.77 | 6.64 | 5.46 | 5.93 | 6.47 | 1.02 | 56 | 2.10E−02 | 1.68 | 3.2 |
| hsa-miR-331 | hsa-miR-331_st2 | 9.13 | 9.74 | 9.49 | 9.46 | 0.31 | 100 | 9.04 | 7.57 | 8.35 | 8.79 | 7.69 | 7.09 | 7.70 | 7.28 | 7.20 | 7.86 | 0.71 | 100 | 4.06E−03 | 1.60 | 3.0 |
| hsa-miR-432 | hsa-miR-432_st2 | 6.55 | 6.33 | 6.61 | 6.50 | 0.15 | 100 | 4.55 | 5.43 | 5.92 | 5.53 | 5.77 | 5.68 | 3.50 | 4.28 | 2.74 | 4.82 | 1.13 | 22 | 3.24E−02 | 1.67 | 3.2 |
| hsa-asg- | hsa-asg-13661_st1 | 7.01 | 5.86 | 7.31 | 6.73 | 0.76 | 100 | 5.65 | 5.51 | 3.31 | 4.93 | 5.49 | 5.24 | 4.78 | 5.31 | 5.29 | 5.05 | 0.71 | 0 | 5.92E−03 | 1.67 | 3.2 |
| 13661 | | | | | | | | | | | | | | | | | | | | | | |
| hsa-asg-4283 | hsa-asg-4283_st2 | 4.37 | 4.74 | 5.58 | 4.90 | 0.62 | 33 | 3.93 | 3.53 | 2.66 | 3.82 | 3.93 | 2.85 | 3.50 | 2.27 | 2.54 | 3.22 | 0.65 | 0 | 3.01E−03 | 1.67 | 3.2 |
| hsa-asg-1619 | hsa-asg-1619_st2 | 4.65 | 5.10 | 5.26 | 5.00 | 0.32 | 33 | 4.37 | 3.29 | 2.86 | 4.81 | 3.16 | 2.85 | 2.32 | 3.07 | 3.25 | 3.33 | 0.78 | 0 | 5.53E−03 | 1.67 | 3.2 |
| hsa-asg-4392 | hsa-asg-4392_st1 | 12.0 | 10.4 | 11.4 | 11.2 | 0.81 | 100 | 10.6 | 10.0 | 8.14 | 10.0 | 10.9 | 9.89 | 9.20 | 10.1 | 7.56 | 9.62 | 1.12 | 100 | 4.17E−02 | 1.66 | 3.2 |
| hsa-asg-924 | hsa-asg-924_st1 | 4.20 | 6.46 | 4.52 | 5.06 | 1.22 | 33 | 4.66 | 4.30 | 3.39 | 4.46 | 2.69 | 2.77 | 2.15 | 2.78 | 3.53 | 3.41 | 0.89 | 0 | 2.88E−02 | 1.65 | 3.1 |
| hsa-asg-8902 | hsa-asg-8902_st2 | 7.53 | 5.22 | 6.48 | 6.41 | 1.16 | 67 | 6.30 | 5.78 | 4.26 | 4.26 | 5.12 | 5.09 | 4.54 | 4.25 | 3.32 | 4.77 | 0.90 | 22 | 2.83E−02 | 1.64 | 3.1 |
| hsa-miR-210 | hsa-miR-210_st1 | 7.96 | 8.71 | 8.00 | 8.23 | 0.42 | 100 | 6.51 | 5.65 | 6.84 | 7.08 | 7.11 | 6.71 | 6.11 | 6.48 | 7.02 | 6.61 | 0.49 | 89 | 4.66E−04 | 1.61 | 3.1 |
| hsa-asg-548 | hsa-asg-548_st1 | 4.26 | 5.18 | 4.60 | 4.68 | 0.47 | 33 | 3.07 | 1.96 | 3.54 | 3.52 | 2.83 | 1.97 | 3.40 | 2.78 | 4.60 | 3.07 | 0.83 | 0 | 1.05E−02 | 1.61 | 3.0 |
| hsa-asg- | hsa-asg-11443_st1 | 2.98 | 6.08 | 5.12 | 4.73 | 1.59 | 67 | 4.17 | 3.64 | 2.86 | 2.69 | 3.54 | 2.69 | 3.40 | 2.78 | 2.33 | 3.12 | 0.59 | 0 | 2.17E−02 | 1.60 | 3.0 |
| 11443 | | | | | | | | | | | | | | | | | | | | | | |
| hsa-miR-526c | hsa-miR-526c_st1 | 5.59 | 4.84 | 3.16 | 4.53 | 1.25 | 33 | 3.56 | 2.71 | 5.04 | 2.69 | 1.55 | 2.99 | 3.17 | 2.62 | 2.10 | 2.94 | 0.98 | 0 | 4.45E−02 | 1.59 | 3.0 |
| hsa-miR-18b | hsa-miR-18b_st1 | 6.45 | 8.39 | 6.72 | 7.19 | 1.05 | 100 | 6.18 | 5.61 | 6.71 | 6.01 | 5.09 | 4.68 | 5.71 | 4.87 | 5.60 | 5.61 | 0.65 | 44 | 9.98E−03 | 1.58 | 3.0 |
| hsa-asg-6277 | hsa-asg-6277_st2 | 8.24 | 6.26 | 8.31 | 7.60 | 1.17 | 100 | 6.89 | 6.98 | 5.06 | 5.95 | 6.49 | 7.01 | 4.94 | 6.34 | 4.57 | 6.03 | 0.95 | 67 | 3.88E−02 | 1.58 | 3.0 |
| hsa-asg-6292 | hsa-asg-6292_st2 | 11.1 | 9.17 | 10.6 | 10.3 | 1.04 | 100 | 9.77 | 9.62 | 7.44 | 8.84 | 9.90 | 8.86 | 7.99 | 9.27 | 7.11 | 8.76 | 1.03 | 67 | 4.52E−02 | 1.57 | 3.0 |
| hsa-asg-1341 | hsa-asg-1341_st1 | 12.1 | 10.5 | 11.5 | 11.4 | 0.82 | 100 | 10.8 | 10.5 | 8.34 | 10.2 | 10.8 | 10.2 | 9.35 | 10.0 | 8.07 | 9.85 | 1.04 | 89 | 4.06E−02 | 1.57 | 3.0 |
| hsa-asg- | hsa-asg-13166_st2 | 5.37 | 5.74 | 5.47 | 5.53 | 0.19 | 100 | 4.49 | 3.42 | 4.87 | 4.95 | 4.11 | 4.18 | 3.59 | 2.08 | 4.07 | 3.97 | 0.88 | 0 | 1.42E−02 | 1.56 | 2.9 |
| 13166 | | | | | | | | | | | | | | | | | | | | | | |
| hsa-miR-132 | hsa-miR-132_st1 | 9.99 | 10.01 | 9.64 | 9.88 | 0.21 | 100 | 9.72 | 8.56 | 8.33 | 8.35 | 8.59 | 8.08 | 8.02 | 8.44 | 6.88 | 8.33 | 0.74 | 89 | 5.76E−03 | 1.55 | 2.9 |
| hsa-asg | hsa-asg-14146_st1 | 6.68 | 8.06 | 7.42 | 7.39 | 0.69 | 100 | 6.30 | 5.77 | 6.23 | 6.49 | 5.95 | 4.84 | 5.80 | 4.68 | 6.48 | 5.84 | 0.67 | 78 | 6.13E−03 | 1.55 | 2.9 |
| 14146 | | | | | | | | | | | | | | | | | | | | | | |
| hsa-miR-181b | hsa-miR-181b_st2 | 11.8 | 12.2 | 12.0 | 12.0 | 0.22 | 100 | 11.2 | 10.4 | 10.9 | 10.8 | 9.83 | 10.3 | 10.2 | 10.4 | 10.1 | 10.5 | 0.44 | 100 | 2.02E−04 | 1.54 | 2.9 |
| hsa-asg- | hsa-asg-11850_st1 | 12.1 | 10.4 | 11.7 | 11.4 | 0.92 | 100 | 10.6 | 10.2 | 8.54 | 10.4 | 11.2 | 10.0 | 9.59 | 10.4 | 8.02 | 9.90 | 1.03 | 100 | 4.57E−02 | 1.53 | 2.9 |
| 11850 | | | | | | | | | | | | | | | | | | | | | | |
| hsa-miR-522 | hsa-miR-522_st2 | 5.37 | 4.52 | 3.95 | 4.61 | 0.72 | 33 | 2.78 | 2.87 | 3.67 | 3.15 | 2.97 | 3.48 | 2.48 | 3.44 | 2.92 | 3.08 | 0.38 | 0 | 6.36E−04 | 1.53 | 2.9 |
| hsa-asg-2535 | hsa-asg-2535_st2 | 9.22 | 7.62 | 8.76 | 8.53 | 0.82 | 100 | 8.10 | 7.49 | 5.53 | 7.17 | 7.78 | 7.18 | 6.38 | 7.87 | 5.66 | 7.02 | 0.95 | 33 | 3.39E−02 | 1.51 | 2.9 |
| hsa-asg-1203 | hsa-asg-1203_st1 | 4.99 | 4.89 | 5.87 | 5.25 | 0.54 | 33 | 4.49 | 4.37 | 2.66 | 3.82 | 4.21 | 4.55 | 3.93 | 3.74 | 1.86 | 3.74 | 0.91 | 0 | 2.31E−02 | 1.51 | 2.9 |
| hsa-miR-335 | hsa-miR-335_st1 | 10.3 | 11.5 | 10.8 | 10.9 | 0.57 | 100 | 10.9 | 10.3 | 8.69 | 10.0 | 9.47 | 9.34 | 9.58 | 7.33 | 9.03 | 9.42 | 1.03 | 100 | 4.03E−02 | 1.50 | 2.8 |
| hsa-miR-30e- | hsa-miR-30e- | 10.7 | 11.6 | 10.8 | 11.0 | 0.49 | 100 | 10.4 | 9.64 | 9.71 | 10.5 | 9.81 | 9.23 | 9.23 | 8.15 | 9.50 | 9.58 | 0.70 | 100 | 6.98E−03 | 1.50 | 2.8 |
| 5p | 5p_st2 | | | | | | | | | | | | | | | | | | | | | |
| hsa-cand283 | hsa-cand283_st1 | 6.92 | 6.20 | 6.85 | 6.66 | 0.40 | 100 | 5.45 | 6.14 | 4.68 | 5.56 | 4.74 | 5.63 | 5.25 | 4.58 | 4.54 | 5.17 | 0.57 | 33 | 1.97E−03 | 1.48 | 2.8 |
| hsa-asg-5210 | hsa-asg-5210_st1 | 10.7 | 9.62 | 10.3 | 10.2 | 0.55 | 100 | 9.63 | 8.99 | 7.52 | 9.06 | 9.73 | 8.45 | 8.37 | 9.19 | 7.69 | 8.74 | 0.79 | 100 | 1.38E−02 | 1.48 | 2.8 |
| hsa- | hsa-miR144_st2 | 3.49 | 6.16 | 5.00 | 4.88 | 1.34 | 67 | 4.61 | 4.43 | 2.66 | 3.40 | 2.69 | 2.69 | 2.78 | 3.20 | 4.24 | 3.41 | 0.81 | 0 | 4.03E−02 | 1.47 | 2.8 |
| miR144_st2 | | | | | | | | | | | | | | | | | | | | | | |
| hsa-miR-148b | hsa-miR-148b_st2 | 10.1 | 10.8 | 11.0 | 10.6 | 0.47 | 100 | 10.0 | 8.79 | 9.44 | 10.0 | 9.63 | 8.27 | 9.09 | 8.14 | 9.14 | 9.18 | 0.70 | 100 | 7.32E−03 | 1.47 | 2.8 |
| hsa-miR-612 | hsa-miR-612_st1 | 7.04 | 6.08 | 7.21 | 6.78 | 0.61 | 100 | 5.39 | 6.49 | 4.72 | 4.19 | 4.93 | 6.34 | 3.93 | 5.58 | 6.21 | 5.31 | 0.94 | 33 | 3.12E−02 | 1.47 | 2.8 |
| hsa-miR-454- | hsa-asg-11541_st2 | 8.57 | 10.4 | 9.58 | 9.52 | 0.92 | 100 | 8.63 | 8.31 | 8.53 | 8.45 | 7.87 | 7.92 | 7.91 | 7.33 | 7.81 | 8.08 | 0.42 | 100 | 3.21E−03 | 1.44 | 2.7 |
| 3p | | | | | | | | | | | | | | | | | | | | | | |
| hsa-miR-454- | hsa-asg-13305_st1 | 9.36 | 10.9 | 10.1 | 10.1 | 0.77 | 100 | 9.63 | 8.98 | 9.24 | 9.13 | 8.55 | 8.77 | 8.57 | 7.82 | 8.33 | 8.78 | 0.54 | 100 | 6.62E−03 | 1.35 | 2.5 |
| 3p | | | | | | | | | | | | | | | | | | | | | | |
| hsa-asg- | hsa-asg-13471_st1 | 5.91 | 5.98 | 6.31 | 6.07 | 0.21 | 100 | 4.76 | 4.76 | 4.39 | 5.12 | 5.35 | 5.40 | 4.38 | 4.07 | 3.53 | 4.64 | 0.61 | 11 | 3.26E−03 | 1.43 | 2.7 |
| 13471 | | | | | | | | | | | | | | | | | | | | | | |
| hsa-asg-4294 | hsa-asg-4294_st2 | 4.81 | 5.10 | 5.06 | 4.99 | 0.16 | 33 | 4.31 | 3.16 | 4.54 | 4.08 | 3.22 | 3.13 | 2.32 | 4.21 | 3.09 | 3.56 | 0.74 | 0 | 9.55E−03 | 1.43 | 2.7 |
| hsa-asg- | hsa-asg-12880_st1 | 8.90 | 7.40 | 8.65 | 8.32 | 0.81 | 100 | 8.02 | 7.00 | 5.74 | 6.88 | 7.99 | 7.03 | 6.49 | 7.25 | 5.69 | 6.90 | 0.83 | 33 | 2.80E−02 | 1.42 | 2.7 |
| 12880 | | | | | | | | | | | | | | | | | | | | | | |
| hsa-asg-109 | hsa-asg-109_st1 | 9.45 | 8.18 | 9.38 | 9.00 | 0.71 | 100 | 8.15 | 8.15 | 5.74 | 7.66 | 8.37 | 7.69 | 7.27 | 8.33 | 6.92 | 7.59 | 0.85 | 89 | 2.77E−02 | 1.41 | 2.7 |
| hsa-asg- | hsa-asg-12271_st1 | 5.92 | 4.11 | 6.13 | 5.39 | 1.11 | 67 | 3.85 | 4.86 | 3.79 | 3.57 | 3.59 | 4.93 | 3.17 | 4.07 | 3.97 | 3.98 | 0.58 | 0 | 1.47E−02 | 1.41 | 2.7 |
| 12271 | | | | | | | | | | | | | | | | | | | | | | |
| hsa-asg- | hsa-asg-10638_st2 | 10.6 | 9.04 | 10.7 | 10.1 | 0.95 | 100 | 9.25 | 9.25 | 7.42 | 8.69 | 9.25 | 9.08 | 8.33 | 8.71 | 8.53 | 8.72 | 0.60 | 100 | 1.11E−02 | 1.41 | 2.7 |
| 10638 | | | | | | | | | | | | | | | | | | | | | | |
| hsa-miR-130a | hsa-miR-130a_st1 | 10.8 | 12.0 | 11.6 | 11.5 | 0.61 | 100 | 10.3 | 9.96 | 9.71 | 10.9 | 10.7 | 9.21 | 10.0 | 9.63 | 10.4 | 10.1 | 0.56 | 100 | 4.32E−03 | 1.40 | 2.6 |
| hsa-miR-130a | hsa-cand144_st1 | 10.8 | 12.0 | 11.6 | 11.5 | 0.58 | 100 | 10.4 | 9.85 | 9.72 | 10.9 | 10.8 | 9.26 | 10.0 | 9.56 | 10.6 | 10.1 | 0.59 | 100 | 6.07E−03 | 1.36 | 2.6 |
| hsa-asg-3267 | hsa-asg-3267_st1 | 9.11 | 7.48 | 9.41 | 8.67 | 1.04 | 33 | 7.73 | 7.84 | 6.32 | 6.77 | 8.08 | 7.63 | 6.68 | 7.78 | 6.72 | 7.29 | 0.65 | 0 | 1.91E−02 | 1.38 | 2.6 |
| hsa-asg-1380 | hsa-asg-1380_st2 | 5.15 | 5.02 | 4.76 | 4.98 | 0.20 | 67 | 4.09 | 3.42 | 1.66 | 4.08 | 4.04 | 3.95 | 3.40 | 4.41 | 3.39 | 3.60 | 0.82 | 0 | 1.89E−02 | 1.37 | 2.6 |
| hsa-as-5241 | hsa-asg-5241_st1 | 4.14 | 4.79 | 4.76 | 4.56 | 0.36 | 33 | 3.66 | 3.64 | 2.66 | 3.28 | 3.22 | 2.53 | 3.59 | 2.45 | 3.77 | 3.20 | 0.52 | 0 | 2.05E−03 | 1.37 | 2.6 |
| hsa-asg-3711 | hsa-asg-3711_st2 | 6.53 | 6.73 | 6.36 | 6.54 | 0.19 | 67 | 5.70 | 6.17 | 5.12 | 5.53 | 5.14 | 5.25 | 4.54 | 4.44 | 4.87 | 5.19 | 0.55 | 0 | 2.40E−03 | 1.35 | 2.5 |
| hsa-asg-60 | hsa-asg-60_st2 | 4.31 | 4.26 | 4.83 | 4.47 | 0.31 | 33 | 3.56 | 4.23 | 3.79 | 2.85 | 2.97 | 2.85 | 1.08 | 3.74 | 3.25 | 3.15 | 0.91 | 0 | 3.72E−02 | 1.32 | 2.5 |
| hsa-asg- | hsa-asg-12515_st2 | 4.97 | 4.93 | 6.07 | 5.32 | 0.65 | 33 | 4.02 | 4.30 | 3.06 | 4.12 | 4.60 | 4.37 | 3.68 | 4.14 | 3.77 | 4.01 | 0.46 | 0 | 2.74E−03 | 1.32 | 2.5 |
| 12515 | | | | | | | | | | | | | | | | | | | | | | |
| hsa-miR-340 | hsa-miR-340_st1 | 5.43 | 6.58 | 6.06 | 6.02 | 0.58 | 67 | 5.83 | 4.99 | 5.24 | 5.71 | 4.89 | 4.46 | 4.49 | 3.99 | 2.74 | 4.71 | 0.94 | 11 | 4.91E−02 | 1.32 | 2.5 |
| hsa-asg-2315 | hsa-asg-2315_st2 | 6.92 | 4.98 | 6.48 | 6.12 | 1.02 | 33 | 5.60 | 5.83 | 4.58 | 4.66 | 5.39 | 4.91 | 3.68 | 4.85 | 3.92 | 4.82 | 0.72 | 0 | 3.28E−02 | 1.30 | 2.5 |
| hsa-cand330 | hsa-cand330_st2 | 4.95 | 5.29 | 6.31 | 5.52 | 0.71 | 100 | 4.76 | 5.04 | 3.54 | 4.71 | 5.15 | 4.18 | 2.64 | 3.99 | 3.97 | 4.22 | 0.80 | 11 | 3.24E−02 | 1.30 | 2.5 |
| hsa-asg-6203 | hsa-asg-6203_st2 | 9.37 | 7.41 | 8.68 | 8.48 | 1.00 | 100 | 7.89 | 7.78 | 6.94 | 7.02 | 7.43 | 7.51 | 6.49 | 7.43 | 6.26 | 7.19 | 0.56 | 100 | 1.62E−02 | 1.29 | 2.4 |
| hsa-miR-99b | hsa-miR-99b_st1 | 11.6 | 11.8 | 11.9 | 11.8 | 0.15 | 100 | 11.0 | 10.5 | 10.5 | 11.4 | 11.1 | 10.1 | 10.1 | 9.52 | 10.3 | 10.5 | 0.59 | 100 | 4.72E−03 | 1.29 | 2.4 |
| hsa-miR-99b | hsa-asg-14196_st2 | 11.7 | 11.9 | 12.0 | 11.9 | 0.15 | 100 | 11.2 | 10.6 | 10.6 | 11.6 | 11.3 | 10.3 | 10.3 | 9.55 | 10.5 | 10.7 | 0.65 | 100 | 9.51E−03 | 1.24 | 2.4 |
| hsa-asg- | hsa-asg-11521_st1 | 8.14 | 7.12 | 8.39 | 7.89 | 0.68 | 100 | 7.13 | 7.83 | 5.55 | 6.35 | 7.20 | 7.38 | 5.69 | 6.42 | 5.88 | 6.60 | 0.82 | 89 | 3.55E−02 | 1.28 | 2.4 |
| 11521 | | | | | | | | | | | | | | | | | | | | | | |
| hsa-asg-9053 | hsa-asg-9053_st1 | 7.50 | 6.46 | 7.50 | 7.15 | 0.60 | 100 | 5.87 | 6.55 | 4.78 | 6.21 | 6.10 | 6.92 | 4.90 | 5.92 | 5.64 | 5.88 | 0.70 | 33 | 1.83E−02 | 1.28 | 2.4 |
| hsa-asg-7471 | hsa-asg-7471_st1 | 6.18 | 7.20 | 7.49 | 6.95 | 0.69 | 100 | 5.60 | 5.72 | 5.67 | 6.74 | 5.70 | 5.30 | 5.25 | 5.00 | 6.09 | 5.68 | 0.51 | 56 | 5.99E−03 | 1.28 | 2.4 |
| hsa-asg-5326 | hsa-asg-5326_st2 | 8.42 | 6.33 | 7.96 | 7.57 | 1.10 | 100 | 6.96 | 7.18 | 5.74 | 6.27 | 6.67 | 6.52 | 5.54 | 6.57 | 5.35 | 6.31 | 0.64 | 67 | 3.11E−02 | 1.26 | 2.4 |
| hsa-miR-652 | hsa-miR-652_st1 | 10.3 | 11.3 | 10.4 | 10.7 | 0.53 | 100 | 9.78 | 9.28 | 9.20 | 9.98 | 9.13 | 9.06 | 9.64 | 9.52 | 9.66 | 9.47 | 0.32 | 100 | 4.76E−04 | 1.26 | 2.4 |
| hsa-asg-67 | hsa-asg-67_st2 | 4.46 | 4.74 | 5.17 | 4.79 | 0.36 | 33 | 4.55 | 3.29 | 4.02 | 2.33 | 3.22 | 3.59 | 3.68 | 3.54 | 3.65 | 3.54 | 0.60 | 0 | 7.56E−03 | 1.25 | 2.4 |
| hsa-miR-511 | hsa-miR-511_st2 | 7.00 | 7.60 | 6.98 | 7.19 | 0.35 | 100 | 5.78 | 5.52 | 6.30 | 6.46 | 6.34 | 5.80 | 5.90 | 6.11 | 5.39 | 5.95 | 0.37 | 89 | 5.16E−04 | 1.24 | 2.4 |
| hsa-asg-7823 | hsa-asg-7823_st1 | 8.63 | 7.23 | 8.71 | 8.19 | 0.83 | 100 | 7.36 | 7.93 | 6.27 | 6.86 | 7.29 | 7.72 | 6.18 | 6.58 | 6.43 | 6.96 | 0.64 | 100 | 2.24E−02 | 1.23 | 2.3 |
| hsa-miR-566 | hsa-miR-566_st1 | 8.13 | 5.71 | 7.54 | 7.13 | 1.26 | 100 | 6.73 | 6.17 | 5.12 | 5.83 | 6.14 | 6.15 | 5.56 | 6.04 | 5.44 | 5.91 | 0.48 | 56 | 2.72E−02 | 1.22 | 2.3 |
| hsa-asg-925 | hsa-asg-925_st1 | 6.56 | 8.50 | 7.58 | 7.55 | 0.97 | 100 | 7.36 | 6.37 | 6.19 | 6.97 | 6.35 | 5.27 | 5.82 | 5.74 | 6.88 | 6.33 | 0.66 | 89 | 3.25E−02 | 1.22 | 2.3 |
| hsa-miR-181c | hsa-miR-181c_st1 | 9.65 | 10.5 | 10.1 | 10.1 | 0.47 | 100 | 9.25 | 8.62 | 9.33 | 9.10 | 8.67 | 7.71 | 9.06 | 8.70 | 9.83 | 8.92 | 0.59 | 100 | 9.63E−03 | 1.21 | 2.3 |
| hsa-asg-1221 | hsa-asg-1221_st2 | 4.65 | 5.18 | 4.43 | 4.75 | 0.39 | 33 | 4.02 | 3.29 | 4.39 | 4.23 | 3.77 | 3.13 | 2.64 | 2.93 | 3.53 | 3.55 | 0.60 | 0 | 9.37E−03 | 1.21 | 2.3 |
| hsa-asg-5115 | hsa-asg-5115_st1 | 8.57 | 7.74 | 8.80 | 8.37 | 0.56 | 100 | 6.98 | 8.05 | 6.75 | 7.16 | 6.99 | 7.39 | 6.19 | 7.54 | 7.46 | 7.17 | 0.53 | 100 | 7.31E−03 | 1.20 | 2.3 |
| hsa-cand173 | hsa-cand173_st1 | 8.25 | 6.06 | 7.55 | 7.29 | 1.11 | 100 | 6.75 | 7.27 | 5.91 | 5.65 | 6.24 | 6.29 | 5.05 | 6.14 | 5.58 | 6.10 | 0.66 | 56 | 4.33E−02 | 1.19 | 2.3 |
| hsa-miR-30a- | hsa-miR-30a- | 9.88 | 9.19 | 10.1 | 9.74 | 0.49 | 100 | 9.33 | 9.03 | 8.26 | 9.31 | 8.40 | 9.13 | 7.93 | 7.39 | 8.19 | 8.55 | 0.68 | 100 | 2.08E−02 | 1.19 | 2.3 |
| 3p | 3p_st1 | | | | | | | | | | | | | | | | | | | | | |
| hsa-asg-954 | hsa-asg-954_st1 | 9.94 | 8.92 | 9.85 | 9.57 | 0.56 | 100 | 8.99 | 8.81 | 8.09 | 8.96 | 8.79 | 8.43 | 8.04 | 7.94 | 7.51 | 8.40 | 0.53 | 100 | 7.95E−03 | 1.17 | 2.3 |
| Has-miR-151 | hsa-miR-151_st2 | 10.1 | 10.7 | 10.7 | 10.5 | 0.34 | 100 | 10.2 | 9.76 | 9.14 | 9.80 | 9.38 | 9.47 | 9.04 | 8.51 | 9.05 | 9.37 | 0.50 | 100 | 4.32E−03 | 1.16 | 2.2 |
| Has-miR-10a | hsa-miR-10a_st1 | 12.1 | 12.4 | 12.2 | 12.2 | 0.13 | 100 | 12.0 | 11.0 | 11.2 | 11.7 | 11.3 | 10.5 | 11.2 | 9.98 | 10.9 | 11.1 | 0.61 | 100 | 9.71E−03 | 1.16 | 2.2 |
| Has-asg-13606 | hsa-asg-13606_st2 | 11.1 | 9.67 | 10.3 | 10.3 | 0.72 | 100 | 10.4 | 9.69 | 8.35 | 9.15 | 9.77 | 9.22 | 8.72 | 9.63 | 7.86 | 9.20 | 0.79 | 100 | 4.93E−02 | 1.16 | 2.2 |
| hsa-asg-14233 | hsa-asg-14233_st1 | 10.1 | 10.5 | 10.5 | 10.3 | 0.22 | 100 | 9.45 | 9.26 | 9.23 | 10.1 | 9.44 | 8.89 | 9.05 | 8.87 | 8.89 | 9.25 | 0.41 | 100 | 1.05E−03 | 1.14 | 2.2 |
| hsa-miR-660 | hsa-miR-660_st1 | 9.32 | 10.2 | 9.42 | 9.67 | 0.52 | 100 | 9.29 | 8.99 | 7.93 | 9.15 | 8.63 | 8.44 | 7.79 | 7.91 | 8.61 | 8.53 | 0.56 | 100 | 1.09E−02 | 1.14 | 2.2 |
| hsa-miR-222 | hsa-miR-222_st2 | 10.9 | 10.8 | 10.8 | 10.8 | 0.08 | 100 | 10.4 | 9.56 | 9.54 | 10.2 | 9.75 | 9.33 | 9.52 | 9.38 | 9.86 | 9.73 | 0.37 | 100 | 4.45E−04 | 1.14 | 2.2 |
| hsa-miR-19b | hsa-miR-19b_st2 | 7.92 | 9.53 | 8.38 | 8.61 | 0.83 | 100 | 8.38 | 8.32 | 7.31 | 8.03 | 8.04 | 6.51 | 6.91 | 6.53 | 7.20 | 7.47 | 0.74 | 100 | 4.81E−02 | 1.14 | 2.2 |
| hsa-asg-6758 | hsa-asg-6758_st1 | 4.51 | 5.32 | 4.72 | 4.85 | 0.42 | 33 | 4.17 | 2.87 | 3.39 | 4.55 | 4.39 | 2.69 | 4.14 | 2.93 | 4.32 | 3.72 | 0.74 | 0 | 3.28E−02 | 1.14 | 2.2 |
| hsa-miR-106b | hsa-miR-106b_st2 | 9.48 | 11.6 | 10.7 | 10.6 | 1.07 | 100 | 9.91 | 9.64 | 10.0 | 10.0 | 9.43 | 8.17 | 9.21 | 9.10 | 9.76 | 9.48 | 0.59 | 100 | 3.88E−02 | 1.14 | 2.2 |
| hsa-miR-324- | hsa-miR-324- | 8.20 | 9.93 | 9.05 | 9.06 | 0.86 | 100 | 7.92 | 8.13 | 8.33 | 8.27 | 7.80 | 7.42 | 7.82 | 7.87 | 7.98 | 7.95 | 0.27 | 100 | 4.51E−03 | 1.11 | 2.2 |
| 5p | 5p_st1 | | | | | | | | | | | | | | | | | | | | | |
| hsa-asg-11877 | hsa-asg-11877_st1 | 5.82 | 5.32 | 6.80 | 5.98 | 0.75 | 33 | 4.37 | 5.71 | 5.21 | 4.49 | 5.36 | 5.03 | 3.85 | 4.89 | 5.07 | 4.89 | 0.57 | 0 | 2.21E−02 | 1.09 | 2.1 |
| hsa-asg-30 | hsa-asg-30_st1 | 12.4 | 11.2 | 11.9 | 11.8 | 0.61 | 100 | 11.5 | 11.2 | 9.95 | 10.6 | 11.4 | 10.9 | 10.3 | 11.0 | 9.79 | 10.7 | 0.63 | 100 | 2.56E−02 | 1.09 | 2.1 |
| hsa-asg-9004 | hsa-asg-9004_st1 | 8.82 | 8.38 | 9.78 | 8.99 | 0.72 | 100 | 7.58 | 8.47 | 6.90 | 7.20 | 8.50 | 8.08 | 7.36 | 8.60 | 8.44 | 7.90 | 0.65 | 100 | 3.37E−02 | 1.09 | 2.1 |
| hsa-asg-191 | hsa-asg-191_st1 | 4.17 | 5.06 | 5.24 | 4.83 | 0.57 | 33 | 3.33 | 3.92 | 2.86 | 3.57 | 3.85 | 4.10 | 4.00 | 3.20 | 4.84 | 3.74 | 0.58 | 0 | 1.88E−02 | 1.08 | 2.1 |
| hsa-asg-12421 | hsa-asg-12421_st1 | 9.22 | 7.49 | 8.51 | 8.41 | 0.87 | 67 | 8.10 | 7.93 | 6.72 | 7.33 | 7.72 | 7.49 | 6.61 | 7.79 | 6.39 | 7.34 | 0.62 | 44 | 4.08E−02 | 1.07 | 2.1 |
| hsa-miR257 | hsa-miR257_st1 | 9.43 | 10.5 | 9.72 | 9.89 | 0.57 | 100 | 9.62 | 9.10 | 9.23 | 9.55 | 8.87 | 8.54 | 8.50 | 8.15 | 7.91 | 8.83 | 0.60 | 100 | 2.28E−02 | 1.06 | 2.1 |
| hsa-miR-30a- | hsa-miR-30a- | 12.6 | 13.2 | 12.8 | 12.9 | 0.32 | 100 | 12.2 | 12.1 | 11.9 | 12.5 | 12.1 | 11.7 | 11.5 | 10.8 | 11.8 | 11.8 | 0.48 | 100 | 5.34E−03 | 1.06 | 2.1 |
| 5p | 5p_st2 | | | | | | | | | | | | | | | | | | | | | |
| hsa-asg-9117 | hsa-asg-9117_st1 | 7.20 | 5.71 | 7.06 | 6.66 | 0.82 | 67 | 5.51 | 6.42 | 5.21 | 5.53 | 5.36 | 6.33 | 5.40 | 4.71 | 5.91 | 5.60 | 0.54 | 0 | 2.57E−02 | 1.06 | 2.1 |
| hsa-miR-30d | hsa-miR-30d_st1 | 13.2 | 13.7 | 13.2 | 13.3 | 0.32 | 100 | 12.7 | 12.1 | 12.4 | 12.9 | 12.4 | 11.8 | 12.1 | 11.6 | 12.5 | 12.3 | 0.43 | 100 | 3.27E−03 | 1.05 | 2.1 |
| hsa-asg-3251 | hsa-asg-3251_st1 | 5.78 | 4.26 | 3.75 | 4.60 | 1.06 | 33 | 4.24 | 4.16 | 4.02 | 2.85 | 3.54 | 3.95 | 2.92 | 3.07 | 3.25 | 3.56 | 0.55 | 0 | 4.53E−02 | 1.04 | 2.1 |
| hsa-miR-134 | hsa-miR-134_st2 | 5.55 | 6.62 | 6.52 | 6.23 | 0.59 | 33 | 5.11 | 5.78 | 5.99 | 5.85 | 5.70 | 4.21 | 4.73 | 4.31 | 5.02 | 5.19 | 0.68 | 0 | 3.99E−02 | 1.04 | 2.1 |
| hsa-asg-2495 | hsa-asg-2495_st2 | 5.57 | 4.79 | 5.33 | 5.23 | 0.40 | 67 | 4.76 | 4.37 | 3.23 | 3.73 | 4.72 | 4.03 | 4.54 | 5.26 | 3.09 | 4.19 | 0.73 | 0 | 4.41E−02 | 1.04 | 2.1 |
| hsa-miR-27a | hsa-miR-27a_st2 | 11.5 | 12.5 | 12.2 | 12.1 | 0.46 | 100 | 11.3 | 11.0 | 11.0 | 12.0 | 11.5 | 10.6 | 10.6 | 10.2 | 11.1 | 11.0 | 0.54 | 100 | 1.52E−02 | 1.03 | 2.0 |
| hsa-asg-5032 | hsa-asg-5032_st2 | 9.60 | 8.30 | 9.19 | 9.03 | 0.66 | 100 | 8.74 | 8.73 | 7.36 | 7.60 | 8.43 | 8.35 | 7.14 | 7.72 | 7.95 | 8.00 | 0.59 | 100 | 2.89E−02 | 1.03 | 2.0 |
| hsa-asg-6618 | hsa-asg-6618_st2 | 6.89 | 5.32 | 7.02 | 6.41 | 0.95 | 67 | 5.48 | 5.99 | 4.50 | 5.32 | 5.74 | 6.11 | 4.94 | 5.20 | 5.25 | 5.39 | 0.51 | 22 | 3.33E−02 | 1.02 | 2.0 |
| hsa-miR-382 | hsa-miR-382_st1 | 7.78 | 7.65 | 7.76 | 7.73 | 0.07 | 100 | 7.17 | 6.85 | 7.35 | 7.13 | 7.43 | 6.56 | 6.29 | 5.93 | 5.81 | 6.72 | 0.61 | 78 | 1.98E−02 | 1.01 | 2.0 |
| hsa-asg-3145 | hsa-asg-3145_st1 | 6.47 | 6.36 | 6.56 | 6.46 | 0.10 | 100 | 5.68 | 5.19 | 5.28 | 6.40 | 6.25 | 5.59 | 4.98 | 4.47 | 5.35 | 5.46 | 0.60 | 33 | 1.98E−02 | 1.00 | 2.0 |

SD, standard deviation;
%, percentage of samples expressing miRNA above background levels;
Log2Diff, difference in VSN-transformed expression bewteen LUN and LNneg samples.

### Example 26

### miRNAs Differentally Expressed Between Normal Pancreas Tissue and Normal Lymph Nodes

[0316] To identify miRNAs that may be useful markers for metastasis of cancerous pancreas cells to lymph nodes, the inventors identified miRNAs that are expressed at significantly higher levels in normal pancreas tissue than in cancer-negative lymph nodes.

[0317] Total RNA, purified from two separate normal human pancreas tissue samples (FirstChoice® Human Pancreas Total RNA, cat. no. AM7954 Ambion, Austin, Tex., USA) and from nine normal human lymph node samples (FirstChoice® Human Lymph Node Total RNA, cat. no. AM7894; Ambion, Austin, Tex., USA) was purchased from Ambion. miRNA purification and labeling and microarray expression analyses were performed as described above in Example 2.

[0318] The inventors identified 195 miRNAs (62 verified, 133 predicted) with significant differential expression between normal pancreas and normal lymph node samples samples (|log 2Diff| pancreas vs LN neg≧1 and p-value<0.05) (Table 25). Among the predicted miRNAs, hsa-miR-375 and -217 had average expression levels over 800-fold higher in the pancreas samples; hsa-miR-216 and -429 had average expression levels that were between 100- and 200-fold higher in pancreas; hsa-miR-200a, -141 and -200b had average expression levels that were between 50- and 75-fold higher in pancreas; hsa-miR-200c, -96, -605, and -802) had average expression levels that were between 20- and 40-fold higher in pancreas; 15 miRNAs had average expression levels that were between 10- and 20-fold higher in pancreas; and 20 miRNAs had average expression levels that were between 5- and 10-fold higher in pancreas samples than in normal lymph nodes. Among the predicted miRNAs, hsa-asg-7615_st2, -4913_st1, -14153_st2, and -5618_st1 had average expression levels that were between 50- and 80-fold higher in pancreas samples; 24 miRNA had average expression levels that were between 10- and 40-fold higher in pancreas; and 57 miRNAs had average expression levels that were between 5- and 10-fold higher in pancreas samples than in normal lymph nodes.

TABLE 25
MicroRNAs Differentially Expressed Between Normal Pancreas Samples (PAN) and
Cancer-Negative Lymph Node Samples (LNneg) from Patients.

| | | PAN | | | | | LNneg | | | | | | | | | | | | | | |
|---|---|---|---|---|---|---|---|---|---|---|---|---|---|---|---|---|---|---|---|---|---|
| Micro RNA | Probe ID | 1 | 2 | M | SD | % | 1 | 2 | 3 | 4 | 5 | 6 | 7 | 8 | 9 | M | SD | % | ttest | log2Diff | Fold |
| hsa-miR-375 | hsa-miR-375_st1 | 14.2 | 14.1 | 14.1 | 0.04 | 100 | 5.96 | 4.93 | 6.23 | 2.85 | 2.97 | 3.69 | 0.99 | 4.63 | 6.39 | 4.29 | 1.82 | 0 | 3.78E−06 | −9.87 | 935. |
| hsa-miR-217 | hsa-miR-217_st1 | 12.8 | 12.6 | 12.8 | 0.19 | 100 | 3.33 | 3.64 | 2.66 | 2.51 | 3.81 | 3.37 | 2.78 | 2.93 | 2.74 | 3.09 | 0.46 | 0 | 9.27E−12 | −9.78 | 882. |
| hsa-miR-216 | hsa-miR-216_st2 | 12.2 | 11.7 | 12.1 | 0.34 | 100 | 4.49 | 3.92 | 5.04 | 4.84 | 4.72 | 4.87 | 4.33 | 5.04 | 4.78 | 4.67 | 0.37 | 0 | 2.70E−11 | −7.47 | 177. |
| hsa-miR-429 | hsa-miR-429_st1 | 10.4 | 9.25 | 9.86 | 0.62 | 100 | 3.45 | 1.54 | 3.67 | 2.13 | 2.37 | 2.69 | 2.32 | 2.45 | 5.39 | 2.89 | 1.14 | 0 | 1.72E−06 | −6.97 | 125. |
| hsa-asg-7615 | hsa-asg-7615_st2 | 8.70 | 8.69 | 8.60 | 0.17 | 100 | 2.25 | 1.96 | 2.66 | 2.23 | 2.19 | 1.88 | 2.78 | 1.88 | 3.09 | 2.32 | 0.43 | 0 | 3.55E−10 | −6.27 | 77.3 |
| hsa-miR-200a | hsa-miR-200a_st2 | 12.1 | 11.3 | 11.7 | 0.40 | 100 | 6.27 | 5.08 | 6.49 | 5.72 | 5.29 | 4.60 | 4.07 | 4.78 | 7.78 | 5.56 | 1.14 | 67 | 4.17E−06 | −6.20 | 73.5 |
| hsa-asg-4913 | hsa-asg-4913_st1 | 8.30 | 7.51 | 8.05 | 0.47 | 100 | 2.05 | 1.96 | 1.66 | 2.77 | 2.01 | 1.88 | 1.60 | 2.45 | 1.38 | 1.97 | 0.43 | 0 | 1.43E−09 | −6.07 | 67.3 |
| hsa-asg-14153 | hsa-asg-14153_st2 | 8.98 | 8.54 | 8.80 | 0.23 | 100 | 3.07 | 2.26 | 3.06 | 3.01 | 2.37 | 2.69 | 1.16 | 2.78 | 4.40 | 2.75 | 0.86 | 0 | 3.68E−07 | −6.04 | 65.9 |
| hsa-miR-141 | hsa-miR-141_st1 | 10.7 | 9.26 | 10.0 | 0.75 | 100 | 5.07 | 3.83 | 4.93 | 4.43 | 4.39 | 2.85 | 3.85 | 3.83 | 4.54 | 4.19 | 0.68 | 0 | 1.72E−07 | −5.88 | 59.0 |
| hsa-miR-200b | hsa-miR-200b_st1 | 13.6 | 13.3 | 13.4 | 0.18 | 100 | 7.62 | 7.80 | 8.90 | 6.69 | 6.82 | 6.87 | 6.51 | 7.65 | 10.4 | 7.70 | 1.26 | 100 | 1.76E−05 | −5.77 | 54.6 |
| hsa-asg-5618 | hsa-asg-5618_st1 | 7.51 | 6.95 | 7.29 | 0.30 | 100 | 1.65 | 1.14 | 1.14 | 1.41 | 1.37 | 2.35 | 1.97 | 1.48 | 1.86 | 1.60 | 0.40 | 0 | 7.59E−10 | −5.70 | 51.9 |
| hsa-miR-200c | hsa-miR-200c_st1 | 14.4 | 14.1 | 14.3 | 0.14 | 100 | 9.60 | 8.84 | 10.3 | 8.18 | 8.15 | 8.14 | 7.98 | 8.89 | 11.5 | 9.07 | 1.21 | 100 | 2.69E−05 | −5.24 | 37.8 |
| hsa-asg-7637 | hsa-asg-7637_st2 | 9.08 | 8.97 | 9.01 | 0.06 | 100 | 3.66 | 2.54 | 4.47 | 3.46 | 3.93 | 4.03 | 3.29 | 3.64 | 5.27 | 3.81 | 0.76 | 0 | 4.68E−07 | −5.20 | 36.9 |
| hsa-miR-96 | hsa-miR-96_st1 | 8.47 | 7.76 | 8.35 | 0.55 | 100 | 4.99 | 3.42 | 3.06 | 3.01 | 4.11 | 2.85 | 3.05 | 1.88 | 3.09 | 3.27 | 0.86 | 11 | 2.78E−06 | −5.08 | 33.8 |
| hsa-miR-605 | hsa-miR-605_st1 | 7.19 | 7.27 | 7.15 | 0.14 | 100 | 2.61 | 2.16 | 3.06 | 0.75 | 1.74 | 2.17 | 2.92 | 3.07 | 4.47 | 2.55 | 1.03 | 0 | 2.18E−05 | −4.61 | 24.3 |
| hsa-miR-802 | hsa-asg-353_st1 | 6.23 | 6.55 | 6.47 | 0.21 | 100 | 2.43 | 3.02 | 2.66 | 2.51 | 2.53 | 0.84 | 0.62 | 2.62 | 1.86 | 2.12 | 0.85 | 0 | 6.58E−06 | −4.35 | 20.4 |
| hsa-miR-802 | hsa-miR140_st1 | 4.82 | 5.31 | 5.40 | 0.63 | 33 | 1.25 | 2.36 | 1.39 | 1.51 | 1.83 | 1.78 | 0.76 | 3.07 | 1.62 | 1.73 | 0.66 | 0 | 7.93E−06 | −3.67 | 12.8 |
| hsa-asg-9219 | hsa-asg-9219_st2 | 6.03 | 6.50 | 6.27 | 0.24 | 67 | 2.61 | 1.75 | 2.18 | 2.60 | 1.83 | 1.88 | 1.42 | 1.29 | 2.33 | 1.99 | 0.48 | 0 | 4.47E−08 | −4.28 | 19.4 |
| hsa-miR-493-5p | hsa-miR-493-5p_st1 | 9.33 | 8.69 | 8.94 | 0.34 | 100 | 4.37 | 3.83 | 6.88 | 6.18 | 6.33 | 3.69 | 4.38 | 1.88 | 4.60 | 4.68 | 1.56 | 33 | 1.08E−03 | −4.25 | 19.1 |
| hsa-miR-215 | hsa-miR-215_st1 | 10.2 | 9.55 | 9.86 | 0.39 | 100 | 6.96 | 5.82 | 5.71 | 6.66 | 5.54 | 4.84 | 5.51 | 5.11 | 5.23 | 5.71 | 0.70 | 33 | 2.27E−06 | −4.15 | 17.8 |
| hsa-asg-13404 | hsa-asg-13404_st2 | 7.13 | 6.91 | 6.98 | 0.13 | 100 | 4.17 | 2.71 | 5.28 | 2.93 | 3.28 | 1.58 | 2.15 | 1.11 | 2.33 | 2.84 | 1.29 | 0 | 3.09E−04 | −4.14 | 17.7 |
| hsa-miR-411 | hsa-miR-411_st1 | 8.05 | 7.77 | 7.95 | 0.16 | 100 | 4.85 | 3.74 | 4.54 | 5.23 | 5.56 | 2.99 | 3.40 | 2.27 | 2.10 | 3.85 | 1.27 | 11 | 2.93E−04 | −4.10 | 17.2 |
| hsa-asg-11715 | hsa-asg-11715_st2 | 5.66 | 6.77 | 5.98 | 0.69 | 67 | 1.85 | 2.36 | 2.18 | 1.51 | 2.11 | 1.78 | 0.62 | 1.48 | 3.39 | 1.92 | 0.75 | 0 | 9.42E−06 | −4.06 | 16.6 |
| hsa-asg-13908 | hsa-asg-13908_st2 | 6.91 | 6.66 | 6.65 | 0.26 | 100 | 2.05 | 2.54 | 3.67 | 2.51 | 1.46 | 2.85 | 2.64 | 2.45 | 3.77 | 2.66 | 0.72 | 0 | 3.61E−06 | −3.99 | 15.9 |
| hsa-miR-487b | hsa-miR-487b_st2 | 9.89 | 9.13 | 9.57 | 0.40 | 100 | 6.06 | 5.84 | 6.97 | 6.90 | 6.25 | 5.40 | 4.90 | 3.74 | 4.40 | 5.61 | 1.10 | 67 | 1.44E−04 | −3.96 | 15.6 |
| hsa-asg-10131 | hsa-asg-10131_st2 | 7.53 | 7.42 | 7.16 | 0.55 | 100 | 3.33 | 3.16 | 3.54 | 2.51 | 2.53 | 3.26 | 2.64 | 3.20 | 5.09 | 3.25 | 0.78 | 0 | 1.35E−05 | −3.91 | 15.0 |
| hsa-miR-183 | hsa-miR-183_st1 | 11.5 | 10.3 | 10.8 | 0.61 | 100 | 7.66 | 6.76 | 6.71 | 7.93 | 7.56 | 5.83 | 7.52 | 6.32 | 6.65 | 6.99 | 0.70 | 89 | 7.14E−06 | −3.88 | 14.7 |
| hsa-asg-10247 | hsa-asg-10247_st1 | 6.52 | 6.39 | 6.40 | 0.11 | 100 | 2.78 | 2.16 | 4.02 | 1.72 | 2.19 | 2.35 | 0.35 | 3.20 | 3.97 | 2.53 | 1.14 | 0 | 2.05E−04 | −3.88 | 14.7 |
| hsa-miR-7 | hsa-miR-7_st1 | 12.8 | 12.1 | 12.4 | 0.33 | 100 | 9.46 | 8.23 | 9.70 | 8.62 | 8.19 | 7.70 | 8.66 | 8.58 | 8.48 | 8.62 | 0.62 | 100 | 1.68E−06 | −3.81 | 14.0 |
| hsa-asg-6160 | hsa-asg-6160_st1 | 5.63 | 5.90 | 5.80 | 0.15 | 33 | 3.45 | 1.75 | 2.18 | 2.77 | 2.11 | 1.01 | 1.25 | 1.11 | 2.33 | 1.99 | 0.81 | 0 | 1.39E−05 | −3.81 | 14.0 |
| hsa-asg-2381 | hsa-asg-2381_st2 | 8.79 | 8.61 | 8.82 | 0.23 | 100 | 6.35 | 4.81 | 6.11 | 6.00 | 4.42 | 5.17 | 4.20 | 4.83 | 3.25 | 5.02 | 1.01 | 56 | 9.35E−05 | −3.80 | 14.0 |
| hsa-asg-12139 | hsa-asg-12139_st2 | 5.32 | 6.59 | 6.12 | 0.69 | 67 | 2.78 | 2.36 | 2.66 | 2.33 | 1.64 | 2.17 | 1.60 | 2.08 | 3.53 | 2.35 | 0.59 | 0 | 3.45E−06 | −3.77 | 13.6 |
| hsa-asg-13705 | hsa-asg-13705_st1 | 6.09 | 6.26 | 6.05 | 0.24 | 100 | 1.65 | 0.95 | 3.79 | 2.33 | 2.69 | 2.35 | 0.35 | 3.20 | 3.25 | 2.29 | 1.12 | 0 | 2.34E−04 | −3.76 | 13.6 |
| hsa-asg-1296 | hsa-asg-1296_st1 | 7.08 | 7.44 | 6.99 | 0.51 | 100 | 3.07 | 2.54 | 4.81 | 2.42 | 2.53 | 2.77 | 3.17 | 3.91 | 4.16 | 3.27 | 0.84 | 0 | 3.28E−05 | −3.72 | 13.2 |
| hsa-miR-192 | hsa-miR-192_st2 | 13.4 | 13.1 | 13.3 | 0.21 | 100 | 10.8 | 9.87 | 10.1 | 10.0 | 9.58 | 8.72 | 9.33 | 8.80 | 9.65 | 9.66 | 0.66 | 100 | 3.15E−06 | −3.71 | 13.1 |
| hsa-miR-539 | hsa-miR-539_st1 | 6.78 | 5.72 | 6.21 | 0.54 | 67 | 2.05 | 3.16 | 2.66 | 3.40 | 2.69 | 2.99 | 1.97 | 2.62 | 1.38 | 2.55 | 0.64 | 0 | 4.81E−06 | −3.67 | 12.7 |
| hsa-miR-539 | hsa-miR177_st1 | 6.40 | 5.01 | 5.68 | 0.70 | 33 | 2.61 | 2.54 | 1.39 | 2.42 | 1.83 | 1.88 | 3.50 | 1.68 | 2.10 | 2.22 | 0.63 | 0 | 1.12E−05 | −3.46 | 11.0 |
| hsa-asg-14182 | hsa-asg-14182_st1 | 5.74 | 4.83 | 5.54 | 0.64 | 33 | 2.43 | 0.95 | 1.92 | 1.82 | 2.61 | 1.78 | 2.78 | 1.88 | 0.73 | 1.88 | 0.69 | 0 | 1.13E−05 | −3.66 | 12.7 |
| hsa-miR-368 | hsa-miR-368_st2 | 10.2 | 9.27 | 9.92 | 0.56 | 100 | 6.49 | 6.52 | 7.70 | 8.08 | 7.70 | 5.24 | 5.64 | 3.99 | 5.09 | 6.27 | 1.39 | 67 | 1.55E−03 | −3.65 | 12.5 |
| hsa-miR-338 | hsa-miR-338_st1 | 8.54 | 7.16 | 7.95 | 0.72 | 100 | 5.11 | 4.08 | 5.57 | 4.86 | 4.04 | 2.17 | 4.78 | 3.44 | 4.89 | 4.33 | 1.03 | 11 | 2.41E−04 | −3.63 | 12.4 |
| hsa-asg-5021 | hsa-asg-5021_st1 | 8.25 | 7.99 | 8.26 | 0.29 | 100 | 5.18 | 4.43 | 6.99 | 6.06 | 5.91 | 3.54 | 4.59 | 3.07 | 2.10 | 4.65 | 1.57 | 22 | 3.23E−03 | −3.61 | 12.2 |
| hsa-asg-11088 | hsa-asg-11088_st1 | 5.89 | 5.91 | 5.90 | 0.01 | 33 | 1.25 | 1.05 | 3.85 | 1.82 | 0.94 | 2.35 | 1.60 | 3.38 | 4.50 | 2.31 | 1.31 | 0 | 9.55E−04 | −3.60 | 12.1 |
| hsa-asg-7472 | hsa-asg-7472_st2 | 5.32 | 5.61 | 5.58 | 0.25 | 33 | 1.65 | 2.16 | 1.92 | 2.03 | 2.90 | 1.78 | 3.59 | 0.93 | 0.93 | 1.99 | 0.85 | 0 | 3.82E−05 | −3.59 | 12.1 |
| hsa-miR202 | hsa-miR202_st2 | 7.35 | 6.57 | 7.07 | 0.43 | 100 | 3.85 | 2.71 | 4.93 | 3.95 | 3.63 | 2.44 | 4.27 | 2.45 | 3.09 | 3.48 | 0.87 | 0 | 5.07E−05 | −3.59 | 12.0 |
| hsa-miR-381 | hsa-miR-381_st2 | 7.04 | 5.91 | 6.67 | 0.66 | 67 | 2.78 | 2.36 | 4.21 | 3.40 | 4.21 | 2.99 | 3.50 | 1.29 | 3.25 | 3.11 | 0.91 | 0 | 1.08E−04 | −3.56 | 11.8 |
| hsa-miR-154 | hsa-miR-154_st2 | 7.54 | 6.60 | 7.03 | 0.48 | 100 | 3.76 | 2.54 | 4.30 | 4.36 | 4.91 | 3.13 | 3.17 | 1.29 | 3.97 | 3.49 | 1.10 | 0 | 3.68E−04 | −3.54 | 11.6 |
| hsa-cand852 | hsa-cand852_st2 | 6.21 | 6.11 | 6.21 | 0.10 | 67 | 3.07 | 1.96 | 2.86 | 3.01 | 2.28 | 2.69 | 2.92 | 2.08 | 3.53 | 2.71 | 0.51 | 0 | 4.85E−07 | −3.49 | 11.3 |
| hsa-asg-8128 | hsa-asg-8128_st1 | 6.17 | 4.88 | 6.32 | 1.52 | 67 | 3.45 | 4.04 | 3.46 | 3.01 | 3.39 | 2.92 | 2.15 | 0.84 | 2.21 | 2.83 | 0.96 | 0 | 7.50E−04 | −3.49 | 11.2 |
| hsa-miR-410 | hsa-miR-410_st1 | 5.98 | 5.75 | 6.01 | 0.28 | 67 | 2.43 | 2.36 | 1.39 | 3.73 | 2.53 | 2.85 | 3.17 | 1.88 | 2.54 | 2.54 | 0.68 | 0 | 7.81E−06 | −3.47 | 11.1 |
| hsa-asg-3822 | hsa-asg-3822_st2 | 6.17 | 6.10 | 6.21 | 0.13 | 33 | 2.05 | 3.02 | 3.67 | 2.03 | 2.45 | 2.17 | 1.60 | 2.93 | 4.78 | 2.75 | 0.99 | 0 | 1.61E−04 | −3.46 | 11.0 |
| hsa-asg-5119 | hsa-asg-5119_st1 | 5.98 | 6.01 | 5.96 | 0.08 | 67 | 2.43 | 2.71 | 1.92 | 1.93 | 2.01 | 2.53 | 2.92 | 2.62 | 3.65 | 2.53 | 0.55 | 0 | 1.15E−06 | −3.43 | 10.8 |
| hsa-asg-8616 | hsa-asg-8616_st2 | 6.73 | 5.39 | 6.87 | 1.56 | 67 | 3.45 | 4.49 | 1.66 | 4.55 | 3.59 | 4.24 | 3.85 | 2.08 | 3.09 | 3.44 | 1.02 | 0 | 1.19E−03 | −3.43 | 10.8 |
| hsa-asg-10080 | hsa-asg-10080_st1 | 6.62 | 5.53 | 5.76 | 0.77 | 33 | 2.05 | 1.75 | 2.43 | 1.82 | 2.37 | 2.44 | 2.48 | 2.27 | 3.39 | 2.33 | 0.48 | 0 | 2.98E−06 | −3.43 | 10.8 |
| hsa-miR-182 | hsa-miR-182_st1 | 12.7 | 12.5 | 12.6 | 0.10 | 100 | 10.2 | 10.0 | 8.85 | 9.82 | 9.37 | 9.55 | 8.99 | 8.57 | 8.13 | 9.28 | 0.70 | 100 | 1.03E−05 | −3.40 | 10.6 |
| hsa-asg-9830 | hsa-asg-9830_st2 | 5.17 | 6.60 | 6.07 | 0.78 | 67 | 3.07 | 2.54 | 1.92 | 2.23 | 2.19 | 2.26 | 3.50 | 2.27 | 4.24 | 2.69 | 0.76 | 0 | 5.91E−05 | −3.38 | 10.4 |
| hsa-miR-432 | hsa-miR-432_st2 | 8.50 | 8.20 | 8.16 | 0.36 | 100 | 4.55 | 5.43 | 5.92 | 5.53 | 5.77 | 5.68 | 3.50 | 4.28 | 2.74 | 4.82 | 1.13 | 22 | 6.18E−04 | −3.34 | 10.1 |
| hsa-miR-495 | hsa-miR-495_st1 | 9.00 | 8.03 | 8.58 | 0.50 | 100 | 6.02 | 4.81 | 6.97 | 6.26 | 6.32 | 4.43 | 5.16 | 2.45 | 4.89 | 5.26 | 1.35 | 56 | 2.29E−03 | −3.32 | 10.0 |
| hsa-asg-1619 | hsa-asg-1619_st2 | 6.34 | 5.35 | 6.65 | 1.48 | 67 | 4.37 | 3.29 | 2.86 | 4.81 | 3.16 | 2.85 | 2.32 | 3.07 | 3.25 | 3.33 | 0.78 | 0 | 4.15E−04 | −3.32 | 10.0 |
| hsa-miR-376a | hsa-miR-376a_st2 | 7.91 | 7.21 | 7.66 | 0.39 | 100 | 5.14 | 4.08 | 5.49 | 5.67 | 4.85 | 4.03 | 2.48 | 3.83 | 3.77 | 4.37 | 1.01 | 0 | 3.26E−04 | −3.28 | 9.7 |
| hsa-miR-376a | hsa-asg-14234_st1 | 6.86 | 6.24 | 6.70 | 0.41 | 100 | 3.33 | 4.30 | 3.39 | 4.00 | 4.85 | 3.69 | 2.92 | 4.07 | 1.86 | 3.60 | 0.87 | 0 | 1.69E−04 | −3.10 | 8.6 |
| hsa-miR-376a | hsa-asg-10049_st1 | 8.04 | 7.35 | 7.91 | 0.50 | 100 | 5.03 | 4.91 | 6.09 | 5.56 | 5.35 | 4.10 | 3.85 | 4.14 | 4.67 | 4.85 | 0.74 | 11 | 6.55E−05 | −3.05 | 8.3 |
| hsa-asg-10947 | hsa-asg-10947_st1 | 6.45 | 5.08 | 6.63 | 1.64 | 67 | 3.66 | 3.53 | 1.66 | 5.10 | 3.77 | 3.69 | 3.59 | 2.62 | 2.54 | 3.35 | 0.97 | 0 | 1.52E−03 | −3.28 | 9.7 |
| hsa-asg-4219 | hsa-asg-4219_st1 | 6.28 | 5.86 | 5.73 | 0.63 | 33 | 3.45 | 1.75 | 1.66 | 1.51 | 2.28 | 1.78 | 2.92 | 2.78 | 3.97 | 2.46 | 0.87 | 0 | 1.49E−04 | −3.28 | 9.7 |
| hsa-asg-13254 | hsa-asg-13254_st1 | 7.94 | 7.78 | 8.15 | 0.50 | 100 | 5.60 | 5.37 | 6.65 | 5.89 | 5.90 | 4.03 | 4.73 | 2.45 | 3.39 | 4.89 | 1.36 | 56 | 2.77E−03 | −3.26 | 9.6 |
| hsa-asg-1270 | hsa-asg-1270_st2 | 6.55 | 5.81 | 6.89 | 1.29 | 100 | 4.24 | 3.64 | 1.92 | 4.08 | 4.58 | 4.89 | 3.05 | 3.32 | 3.25 | 3.66 | 0.90 | 0 | 6.46E−04 | −3.23 | 9.4 |
| hsa-asg-3711 | hsa-asg-3711_st2 | 8.56 | 8.03 | 8.41 | 0.34 | 100 | 5.70 | 6.17 | 5.12 | 5.53 | 5.14 | 5.25 | 4.54 | 4.44 | 4.87 | 5.19 | 0.55 | 0 | 2.96E−06 | −3.22 | 9.3 |
| hsa-asg-12841 | hsa-asg-12841_st1 | 6.09 | 5.42 | 6.55 | 1.41 | 33 | 4.09 | 3.87 | 2.18 | 4.15 | 4.04 | 4.10 | 2.71 | 3.20 | 1.62 | 3.33 | 0.96 | 0 | 1.07E−03 | −3.22 | 9.3 |
| hsa-asg-5617 | hsa-asg-5617_st1 | 6.15 | 5.69 | 6.00 | 0.27 | 67 | 3.76 | 3.29 | 3.91 | 3.63 | 3.44 | 2.69 | 1.42 | 1.48 | 1.62 | 2.80 | 1.03 | 0 | 4.30E−04 | −3.20 | 9.2 |
| hsa-asg-14208 | hsa-asg-14208_st1 | 6.99 | 6.39 | 6.84 | 0.39 | 100 | 5.07 | 3.53 | 4.47 | 4.15 | 3.39 | 1.19 | 3.05 | 4.07 | 3.97 | 3.65 | 1.10 | 0 | 7.47E−04 | −3.18 | 9.1 |
| hsa-cand318 | hsa-cand318_st1 | 6.74 | 5.21 | 5.80 | 0.83 | 33 | 2.93 | 1.75 | 3.23 | 3.34 | 2.76 | 0.84 | 3.59 | 2.45 | 2.74 | 2.63 | 0.86 | 0 | 2.38E−04 | −3.17 | 9.0 |
| hsa-asg-4756 | hsa-asg-4756_st2 | 5.51 | 4.59 | 6.03 | 1.75 | 33 | 2.78 | 3.10 | 3.46 | 1.93 | 4.33 | 3.64 | 1.25 | 3.26 | 1.98 | 2.86 | 0.98 | 0 | 2.29E−03 | −3.17 | 9.0 |
| hsa-asg-13166 | hsa-asg-13166_st2 | 7.46 | 6.57 | 7.13 | 0.48 | 100 | 4.49 | 3.42 | 4.87 | 4.95 | 4.11 | 4.18 | 3.59 | 2.08 | 4.07 | 3.97 | 0.88 | 0 | 1.70E−04 | −3.15 | 8.9 |
| hsa-miR-194 | hsa-miR-194_st2 | 12.4 | 11.5 | 12.0 | 0.45 | 100 | 9.83 | 9.37 | 8.91 | 9.35 | 8.95 | 8.34 | 8.55 | 8.21 | 9.05 | 8.95 | 0.52 | 100 | 3.44E−06 | −3.12 | 8.7 |
| hsa-asg-13135 | hsa-asg-13135_st1 | 8.24 | 8.21 | 8.25 | 0.05 | 100 | 5.62 | 5.67 | 5.24 | 4.91 | 4.79 | 4.75 | 5.16 | 4.47 | 5.60 | 5.13 | 0.43 | 22 | 2.88E−07 | −3.12 | 8.7 |
| hsa-miR-485-3p | hsa-miR23_st2 | 6.88 | 6.01 | 6.38 | 0.45 | 67 | 4.31 | 2.54 | 4.12 | 3.28 | 2.45 | 3.26 | 3.59 | 2.78 | 3.09 | 3.27 | 0.65 | 0 | 1.86E−05 | −3.11 | 8.6 |
| hsa-miR-485-3p | hsa-miR-485-3p_st2 | 6.34 | 6.19 | 6.18 | 0.16 | 67 | | | 4.30 | 4.43 | 4.27 | 3.13 | 3.68 | 3.54 | 3.87 | 3.77 | 0.50 | 0 | 1.23E−05 | −2.41 | 5.3 |
| hsa-asg-4283 | hsa-asg-4283_st2 | 5.89 | 5.01 | 6.31 | 1.56 | 67 | 3.93 | 3.53 | 2.66 | 3.82 | 3.93 | 2.85 | 3.50 | 2.27 | 2.54 | 3.22 | 0.65 | 0 | 4.61E−04 | −3.09 | 8.5 |
| hsa-asg-9980 | hsa-asg-9980_st1 | 7.15 | 6.60 | 7.00 | 0.35 | 100 | 5.18 | 4.49 | 4.02 | 1.72 | 3.39 | 2.85 | 3.85 | 5.08 | 4.67 | 3.92 | 1.12 | 11 | 1.06E−03 | −3.09 | 8.5 |
| hsa-miR-130b | hsa-miR-130b_st1 | 11.1 | 10.9 | 11.0 | 0.11 | 100 | 8.13 | 8.06 | 8.95 | 7.75 | 7.52 | 7.34 | 7.94 | 7.71 | 8.10 | 7.95 | 0.46 | 100 | 6.55E−07 | −3.07 | 8.4 |
| hsa-asg-13878 | hsa-asg-13878_st2 | 6.13 | 4.53 | 6.31 | 1.88 | 33 | 2.93 | 3.53 | 2.86 | 4.84 | 4.27 | 3.37 | 3.05 | 2.45 | 1.86 | 3.24 | 0.90 | 0 | 2.72E−03 | −3.07 | 8.4 |
| hsa-asg-9499 | hsa-asg-9499_st2 | 3.90 | 5.42 | 4.90 | 0.86 | 33 | 3.33 | 1.34 | 1.66 | 2.33 | 2.28 | 1.01 | 0.62 | 2.62 | 1.38 | 1.84 | 0.86 | 0 | 3.38E−04 | −3.06 | 8.3 |
| hsa-cand26 | hsa-cand26_st2 | 8.17 | 7.90 | 8.06 | 0.14 | 100 | 6.12 | 5.61 | 6.03 | 4.08 | 3.68 | 4.75 | 5.29 | 4.07 | 5.46 | 5.01 | 0.90 | 22 | 2.13E−04 | −3.05 | 8.3 |
| hsa-asg-9866 | hsa-asg-9866_st1 | 6.27 | 6.47 | 6.15 | 0.39 | 100 | 2.93 | 2.16 | 3.06 | 3.15 | 3.04 | 3.13 | 3.40 | 3.32 | 3.87 | 3.12 | 0.45 | 0 | 1.24E−06 | −3.03 | 8.2 |
| hsa-asg-3251 | hsa-asg-3251_st1 | 7.04 | 6.62 | 6.58 | 0.48 | 100 | 4.24 | 4.16 | 4.02 | 2.85 | 3.54 | 3.95 | 2.92 | 3.07 | 3.25 | 3.56 | 0.55 | 0 | 7.35E−06 | −3.02 | 8.1 |
| hsa-asg-11160 | hsa-asg-11160_st2 | 6.56 | 6.21 | 6.25 | 0.29 | 67 | 2.78 | 3.16 | 3.39 | 3.08 | 2.90 | 2.69 | 2.48 | 3.54 | 5.14 | 3.24 | 0.79 | 0 | 8.73E−05 | −3.01 | 8.1 |
| hsa-miR-127 | hsa-miR-127_st1 | 9.89 | 9.11 | 9.53 | 0.39 | 100 | 6.81 | 5.57 | 7.95 | 7.53 | 7.69 | 5.72 | 6.59 | 5.49 | 5.44 | 6.53 | 1.02 | 56 | 6.84E−04 | −2.99 | 8.0 |
| hsa-asg-8174 | hsa-asg-8174_st1 | 6.56 | 5.91 | 6.23 | 0.33 | 67 | 3.33 | 4.08 | 2.86 | 3.01 | 2.90 | 3.26 | 2.78 | 2.78 | 4.16 | 3.24 | 0.53 | 0 | 4.32E−06 | −2.99 | 7.9 |
| hsa-asg-10175 | hsa-asg-10175_st2 | 5.05 | 3.34 | 5.17 | 1.89 | 33 | 2.43 | 2.54 | 1.92 | 2.03 | 1.83 | 2.92 | 2.32 | 1.48 | 2.54 | 2.22 | 0.44 | 0 | 8.15E−04 | −2.94 | 7.7 |
| hsa-asg-11361 | hsa-asg-11361_st2 | 6.49 | 6.52 | 6.36 | 0.24 | 100 | 2.78 | 3.53 | 3.39 | 3.28 | 3.63 | 3.37 | 3.85 | 2.62 | 4.32 | 3.42 | 0.52 | 0 | 3.10E−06 | −2.94 | 7.7 |
| hsa-miR-592 | hsa-miR-592_st1 | 5.05 | 6.17 | 5.90 | 0.76 | 67 | 4.31 | 2.54 | 2.86 | 3.15 | 1.83 | 1.78 | 3.05 | 2.62 | 4.54 | 2.96 | 0.96 | 0 | 7.30E−04 | −2.94 | 7.7 |
| hsa-miR-592 | hsa-asg-4400_st1 | 5.13 | 5.86 | 5.61 | 0.42 | 33 | 3.07 | 3.29 | 3.67 | 1.72 | 1.64 | 2.69 | 3.05 | 1.68 | 5.42 | 2.92 | 1.21 | 11 | 4.18E−03 | −2.69 | 6.5 |
| hsa-asg-280 | hsa-asg-280_st1 | 6.09 | 6.41 | 5.93 | 0.58 | 67 | 3.21 | 2.71 | 4.47 | 2.13 | 2.53 | 2.17 | 1.79 | 3.44 | 4.54 | 3.00 | 1.00 | 0 | 7.93E−04 | −2.93 | 7.6 |
| hsa-asg-1203 | hsa-asg-1203_st1 | 6.34 | 5.60 | 6.66 | 1.26 | 67 | 4.49 | 4.37 | 2.66 | 3.82 | 4.21 | 4.55 | 3.93 | 3.74 | 1.86 | 3.74 | 0.91 | 0 | 1.25E−03 | −2.93 | 7.6 |
| hsa-cand206 | hsa-cand206_st1 | 5.79 | 5.81 | 5.59 | 0.36 | 67 | 2.25 | 1.96 | 3.79 | 3.63 | 2.69 | 2.17 | 3.59 | 1.29 | 2.74 | 2.68 | 0.86 | 0 | 2.33E−04 | −2.91 | 7.5 |
| hsa-asg-5190 | hsa-asg-5190_st1 | 6.01 | 5.10 | 5.57 | 0.45 | 67 | 3.76 | 2.54 | 2.18 | 2.69 | 2.76 | 3.37 | 1.79 | 2.27 | 2.54 | 2.66 | 0.60 | 0 | 1.86E−05 | −2.91 | 7.5 |
| hsa-asg-7464 | hsa-asg-7464_st2 | 6.69 | 5.99 | 6.45 | 0.40 | 67 | 4.61 | 3.92 | 4.81 | 2.51 | 4.00 | 2.17 | 3.68 | 2.27 | 3.87 | 3.54 | 0.99 | 0 | 6.77E−04 | −2.91 | 7.5 |
| hsa-asg-4978 | hsa-asg-4978_st2 | 4.87 | 5.78 | 5.42 | 0.49 | 33 | 1.65 | 2.87 | 2.86 | 1.72 | 2.01 | 1.97 | 2.78 | 2.62 | 4.16 | 2.52 | 0.79 | 0 | 1.47E−04 | −2.91 | 7.5 |
| hsa-cand330 | hsa-cand330_st2 | 7.00 | 5.66 | 7.12 | 1.53 | 67 | 4.76 | 5.04 | 3.54 | 4.71 | 5.15 | 4.18 | 2.64 | 3.99 | 3.97 | 4.22 | 0.80 | 11 | 1.36E−03 | −2.90 | 7.5 |
| hsa-asg-7159 | hsa-asg-7159_st2 | 5.79 | 5.03 | 6.27 | 1.53 | 33 | 3.56 | 3.29 | 2.43 | 3.95 | 3.93 | 3.48 | 4.00 | 3.44 | 2.33 | 3.38 | 0.62 | 0 | 6.10E−04 | −2.89 | 7.4 |
| hsa-asg-8668 | hsa-asg-8668_st2 | 6.44 | 5.33 | 6.74 | 1.58 | 67 | 4.55 | 4.16 | 3.23 | 5.06 | 5.07 | 4.55 | 3.59 | 2.45 | 2.10 | 3.86 | 1.09 | 0 | 4.96E−03 | −2.88 | 7.4 |
| hsa-miR-200a* | hsa-miR-200a-_st2 | 6.34 | 4.91 | 5.58 | 0.72 | 67 | 3.07 | 2.87 | 2.18 | 3.91 | 2.61 | 1.78 | 2.15 | 3.20 | 2.92 | 2.74 | 0.65 | 0 | 7.55E−05 | −2.84 | 7.1 |
| hsa-miR-134 | hsa-miR-134_st2 | 7.89 | 7.97 | 8.02 | 0.16 | 100 | 5.11 | 5.78 | 5.99 | 5.85 | 5.70 | 4.21 | 4.73 | 4.31 | 5.02 | 5.19 | 0.68 | 0 | 3.85E−05 | −2.83 | 7.1 |
| hsa-asg-3373 | hsa-asg-3373_st2 | 7.95 | 4.24 | 5.63 | 2.02 | 33 | 3.56 | 1.96 | 2.66 | 3.77 | 4.08 | 3.69 | 1.79 | 1.88 | 1.86 | 2.80 | 0.96 | 0 | 6.85E−03 | −2.83 | 7.1 |
| hsa-miR-154* | hsa-miR-154-_st2 | 6.73 | 7.02 | 7.15 | 0.51 | 100 | 5.83 | 3.53 | 4.21 | 4.99 | 4.63 | 3.95 | 4.27 | 3.20 | 4.40 | 4.33 | 0.78 | 11 | 1.78E−04 | −2.82 | 7.1 |
| hsa-asg-13471 | hsa-asg-13471_st1 | 7.13 | 6.24 | 7.45 | 1.41 | 100 | 4.76 | 4.76 | 4.39 | 5.12 | 5.35 | 5.40 | 4.38 | 4.07 | 3.53 | 4.64 | 0.61 | 11 | 4.95E−04 | −2.82 | 7.0 |
| hsa-miR-323 | hsa-miR-323_st1 | 7.12 | 6.57 | 6.72 | 0.35 | 33 | 4.17 | 3.47 | 4.02 | 5.77 | 5.12 | 2.99 | 3.64 | 2.93 | 3.25 | 3.93 | 0.97 | 0 | 7.71E−04 | −2.79 | 6.9 |
| hsa-asg-13922 | hsa-asg-13922_st1 | 6.21 | 6.53 | 6.66 | 0.53 | 100 | 4.71 | 5.40 | 1.66 | 4.84 | 5.58 | 5.17 | 4.07 | 2.27 | 1.38 | 3.90 | 1.67 | 0 | 2.08E−02 | −2.76 | 6.8 |
| hsa-miR-485-5p | hsa-miR-485-5p_st2 | 5.74 | 6.05 | 5.85 | 0.17 | 33 | 3.45 | 3.29 | 3.39 | 3.68 | 3.28 | 1.97 | 3.50 | 1.88 | 3.53 | 3.11 | 0.68 | 0 | 5.24E−05 | −2.74 | 6.7 |
| hsa-miR-382 | hsa-miR-382_st1 | 9.24 | 9.51 | 9.46 | 0.20 | 100 | 7.17 | 6.85 | 7.35 | 7.13 | 7.43 | 6.56 | 6.29 | 5.93 | 5.81 | 6.72 | 0.61 | 78 | 2.20E−05 | −2.73 | 6.7 |
| hsa-asg-13928 | hsa-asg-13928_st1 | 5.63 | 4.96 | 6.25 | 1.69 | 33 | 4.55 | 3.69 | 2.66 | 3.40 | 3.97 | 4.18 | 2.99 | 1.88 | 4.54 | 3.54 | 0.90 | 0 | 4.19E−03 | −2.71 | 6.6 |
| hsa-asg-1596 | hsa-asg-1596_st2 | 7.15 | 6.69 | 6.94 | 0.23 | 100 | 4.43 | 5.12 | 4.02 | 3.21 | 4.39 | 4.18 | 4.14 | 4.21 | 4.40 | 4.23 | 0.50 | 0 | 4.57E−06 | −2.70 | 6.5 |
| hsa-asg-10881 | hsa-asg-10881_st1 | 7.92 | 7.62 | 7.90 | 0.27 | 100 | 5.73 | 5.04 | 6.06 | 5.43 | 4.79 | 5.46 | 4.20 | 5.04 | 5.23 | 5.22 | 0.54 | 22 | 1.12E−05 | −2.68 | 6.4 |
| hsa-miR-409-3p | hsa-miR-409-3p_st1 | 7.36 | 6.04 | 6.45 | 0.79 | 33 | 2.25 | 3.47 | 5.14 | 4.99 | 4.77 | 2.99 | 3.96 | 2.62 | 3.77 | 3.77 | 1.05 | 0 | 2.48E−03 | −2.67 | 6.4 |
| hsa-miR-203 | hsa-miR-203_st2 | 10.8 | 8.88 | 9.45 | 1.18 | 100 | 7.33 | 5.89 | 7.21 | 8.24 | 6.45 | 5.41 | 5.19 | 6.07 | 9.36 | 6.79 | 1.37 | 78 | 1.37E−02 | −2.66 | 6.3 |
| hsa-asg-2844 | hsa-asg-2844_st1 | 4.49 | 4.27 | 5.52 | 1.97 | 33 | 3.76 | 4.23 | 2.18 | 2.85 | 2.01 | 2.99 | 2.78 | 2.62 | 2.54 | 2.89 | 0.71 | 0 | 4.58E−03 | −2.64 | 6.2 |
| hsa-miR-379 | hsa-miR-379_st1 | 9.33 | 9.04 | 9.22 | 0.16 | 100 | 6.52 | 6.42 | 7.11 | 6.97 | 7.04 | 6.59 | 6.35 | 6.14 | 6.23 | 6.60 | 0.36 | 100 | 3.15E−07 | −2.63 | 6.2 |
| hsa-miR-148a | hsa-miR-148a_st1 | 12.9 | 13.1 | 13.2 | 0.30 | 100 | 12.1 | 11.1 | 11.5 | 10.5 | 10.2 | 11.0 | 10.2 | 9.18 | 9.38 | 10.6 | 0.96 | 100 | 1.16E−03 | −2.61 | 6.1 |
| hsa-asg-12907 | hsa-asg-12907_st2 | 5.51 | 4.91 | 5.32 | 0.36 | 33 | 3.76 | 2.87 | 3.54 | 2.51 | 2.83 | 1.97 | 2.78 | 1.68 | 2.54 | 2.72 | 0.66 | 0 | 8.14E−05 | −2.60 | 6.0 |
| hsa-asg-10309 | hsa-asg-10309_st1 | 6.05 | 7.02 | 6.81 | 0.68 | 100 | 5.25 | 5.79 | 2.18 | 4.66 | 6.03 | 5.01 | 3.93 | 3.07 | 2.33 | 4.25 | 1.45 | 33 | 1.63E−02 | −2.56 | 5.9 |
| hsa-asg-9510 | hsa-asg-9510_st1 | 8.23 | 8.74 | 8.78 | 0.57 | 67 | 6.93 | 7.30 | 4.98 | 6.81 | 8.07 | 7.15 | 6.29 | 4.66 | 3.87 | 6.23 | 1.41 | 0 | 1.37E−02 | −2.55 | 5.9 |
| hsa-miR-369-5p | hsa-miR-369-5p_st2 | 6.72 | 5.35 | 6.00 | 0.69 | 67 | 3.56 | 2.71 | 4.47 | 4.36 | 4.36 | 2.53 | 2.92 | 2.62 | 3.53 | 3.45 | 0.80 | 0 | 5.92E−04 | −2.55 | 5.9 |
| hsa-miR-369-5p | hsa-asg-1521_st1 | 6.35 | 5.06 | 5.75 | 0.65 | 33 | 3.76 | 3.42 | 4.02 | 2.23 | 3.72 | 3.73 | 3.40 | 2.78 | 3.53 | 3.40 | 0.56 | 0 | 1.16E−04 | −2.35 | 5.1 |
| hsa-asg-4472 | hsa-asg-4472_st2 | 5.91 | 3.60 | 5.78 | 2.12 | 33 | 3.76 | 4.00 | 2.86 | 2.93 | 3.63 | 4.34 | 2.92 | 1.88 | 2.74 | 3.23 | 0.76 | 0 | 8.37E−03 | −2.55 | 5.9 |
| hsa-asg-4542 | hsa-asg-4542_st2 | 7.40 | 6.75 | 7.50 | 0.81 | 100 | 5.94 | 4.99 | 4.12 | 6.59 | 6.41 | 5.63 | 3.77 | 3.07 | 4.32 | 4.98 | 1.24 | 33 | 8.82E−03 | −2.52 | 5.7 |
| hsa-asg-12515 | hsa-asg-12515_st2 | 6.15 | 5.17 | 6.51 | 1.55 | 33 | 4.02 | 4.30 | 3.06 | 4.12 | 4.60 | 4.37 | 3.68 | 4.14 | 3.77 | 4.01 | 0.46 | 0 | 8.87E−04 | −2.50 | 5.7 |
| hsa-asg-2845 | hsa-asg-2845_st2 | 5.63 | 3.47 | 5.50 | 1.96 | 33 | 2.93 | 3.83 | 3.06 | 3.68 | 2.01 | 3.19 | 3.05 | 2.78 | 2.54 | 3.01 | 0.55 | 0 | 4.03E−03 | −2.49 | 5.6 |
| hsa-miR-299-5p | hsa-miR-299-5p_st2 | 7.53 | 6.63 | 7.21 | 0.50 | 100 | 5.73 | 4.49 | 5.80 | 6.38 | 5.99 | 2.99 | 5.05 | 2.45 | 3.97 | 4.76 | 1.39 | 44 | 1.57E−02 | −2.44 | 5.4 |
| hsa-asg-1268 | hsa-asg-1268_st1 | 6.39 | 5.72 | 6.12 | 0.36 | 67 | 4.76 | 3.29 | 4.02 | 4.15 | 3.49 | 3.78 | 3.85 | 2.27 | 3.65 | 3.70 | 0.68 | 0 | 1.80E−04 | −2.43 | 5.4 |
| hsa-asg-548 | hsa-asg-548_st1 | 5.89 | 5.42 | 5.50 | 0.36 | 33 | 3.07 | 1.96 | 3.54 | 3.52 | 2.83 | 1.97 | 3.40 | 2.78 | 4.60 | 3.07 | 0.83 | 0 | 7.14E−04 | −2.42 | 5.4 |
| hsa-asg-3807 | hsa-asg-3807_st1 | 6.40 | 5.42 | 5.64 | 0.68 | 33 | 3.07 | 3.42 | 3.06 | 3.95 | 3.89 | 1.68 | 3.40 | 2.93 | 3.65 | 3.23 | 0.68 | 0 | 3.52E−04 | −2.41 | 5.3 |
| hsa-asg-6283 | hsa-asg-6283_st1 | 6.30 | 6.49 | 6.61 | 0.37 | 100 | 3.85 | 5.48 | 3.31 | 4.60 | 6.35 | 5.22 | 4.98 | 2.17 | 1.98 | 4.22 | 1.50 | 11 | 2.43E−02 | −2.39 | 5.2 |
| hsa-asg-12666 | hsa-asg-12666_st2 | 7.63 | 6.75 | 7.21 | 0.44 | 100 | 6.08 | 4.66 | 4.87 | 4.91 | 4.65 | 4.60 | 4.82 | 3.99 | 4.84 | 4.83 | 0.55 | 11 | 4.79E−05 | −2.39 | 5.2 |
| hsa-asg-4840 | hsa-asg-4840_st1 | 6.70 | 6.45 | 7.21 | 1.11 | 100 | 5.45 | 5.08 | 3.54 | 5.28 | 5.43 | 5.03 | 4.64 | 4.58 | 4.40 | 4.83 | 0.61 | 11 | 6.83E−04 | −2.39 | 5.2 |
| hsa-asg-6619 | hsa-asg-6619_st1 | 4.92 | 4.06 | 5.15 | 1.22 | 33 | 2.61 | 0.54 | 2.05 | 4.71 | 2.90 | 4.28 | 3.50 | 2.36 | 1.98 | 2.77 | 1.27 | 0 | 1.78E−02 | −2.38 | 5.2 |
| hsa-asg-10236 | hsa-asg-10236_st2 | 6.01 | 4.53 | 6.18 | 1.75 | 33 | 4.09 | 3.53 | 3.06 | 4.52 | 5.17 | 3.78 | 3.17 | 3.74 | 3.39 | 3.83 | 0.68 | 0 | 5.11E−03 | −2.36 | 5.1 |
| hsa-miR-494 | hsa-miR-494_st1 | 9.21 | 8.79 | 9.06 | 0.24 | 100 | 6.40 | 7.30 | 7.22 | 6.96 | 6.63 | 7.66 | 5.73 | 5.86 | 6.60 | 6.71 | 0.65 | 100 | 1.35E−04 | −2.35 | 5.1 |
| hsa-miR-494 | hsa-miR61_st2 | 8.60 | 7.71 | 8.20 | 0.45 | 100 | 6.83 | 6.55 | 6.85 | 6.43 | 6.38 | 7.10 | 5.40 | 5.79 | 6.89 | 6.47 | 0.55 | 89 | 6.64E−04 | −1.74 | 3.3 |
| hsa-asg-3185 | hsa-asg-3185_st1 | 5.91 | 4.69 | 6.14 | 1.58 | 33 | 4.49 | 4.27 | 2.76 | 4.93 | 4.53 | 5.27 | 2.32 | 2.53 | 3.17 | 3.81 | 1.11 | 0 | 1.68E−02 | −2.33 | 5.0 |
| hsa-asg-7038 | hsa-asg-7038_st1 | 3.90 | 1.79 | 4.13 | 2.46 | 33 | 1.45 | 0.54 | 2.76 | 3.08 | 2.37 | 0.68 | 2.15 | 1.98 | 1.26 | 1.81 | 0.89 | 0 | 2.79E−02 | −2.32 | 5.0 |
| hsa-asg-67 | hsa-asg-67_st2 | 6.61 | 5.19 | 5.86 | 0.71 | 67 | 4.55 | 3.29 | 4.02 | 2.33 | 3.22 | 3.59 | 3.68 | 3.54 | 3.65 | 3.54 | 0.60 | 0 | 2.42E−04 | −2.32 | 5.0 |
| hsa-miR-129 | hsa-miR-129_st1 | 8.28 | 6.08 | 6.85 | 1.24 | 67 | 4.85 | 4.81 | 5.24 | 4.81 | 4.21 | 3.95 | 4.49 | 4.58 | 4.40 | 4.59 | 0.39 | 0 | 4.13E−04 | −2.26 | 4.8 |
| hsa-asg-3873 | hsa-asg-3873_st1 | 5.17 | 4.24 | 5.33 | 1.18 | 33 | 4.17 | 2.26 | 2.54 | 1.72 | 3.77 | 3.82 | 3.40 | 3.38 | 2.64 | 3.08 | 0.82 | 0 | 3.91E−03 | −2.25 | 4.8 |
| hsa-miR-376b | hsa-miR-376b_st1 | 4.96 | 3.47 | 4.55 | 0.94 | 33 | 1.85 | 2.16 | 4.12 | 3.34 | 2.69 | 1.01 | 2.78 | 2.53 | 0.21 | 2.30 | 1.18 | 0 | 1.39E−02 | −2.25 | 4.8 |
| hsa-asg-3081 | hsa-asg-3081_st1 | 5.66 | 6.11 | 6.23 | 0.63 | 33 | 4.76 | 4.49 | 3.23 | 4.30 | 5.75 | 4.55 | 3.77 | 3.91 | 1.38 | 4.01 | 1.21 | 11 | 1.44E−02 | −2.21 | 4.6 |
| hsa-miR-329 | hsa-asg-13589_st2 | 6.32 | 4.49 | 5.39 | 0.91 | 33 | 1.65 | 3.16 | 3.79 | 3.73 | 4.42 | 2.35 | 3.68 | 2.78 | 3.09 | 3.18 | 0.84 | 0 | 3.11E−03 | −2.21 | 4.6 |
| hsa-miR-329 | hsa-miR-329_st1 | 5.66 | 5.27 | 5.47 | 0.19 | 33 | 3.76 | 3.02 | 4.61 | 3.28 | 4.58 | 2.85 | 2.78 | 3.32 | 2.74 | 3.44 | 0.73 | 0 | 9.45E−04 | −2.03 | 4.1 |
| hsa-miR-329 | hsa-asg-13204_st2 | 5.79 | 3.92 | 5.08 | 1.01 | 67 | 4.09 | 2.87 | 4.21 | 3.40 | 4.24 | 3.48 | 4.00 | 2.62 | 3.53 | 3.61 | 0.59 | 0 | 9.50E−03 | −1.48 | 2.8 |
| hsa-asg-9512 | hsa-asg-9512_st1 | 8.12 | 8.25 | 8.33 | 0.27 | 100 | 6.42 | 6.94 | 4.61 | 6.58 | 7.81 | 7.05 | 6.37 | 5.29 | 5.23 | 6.25 | 1.02 | 11 | 6.92E−03 | −2.08 | 4.2 |
| hsa-asg-5996 | hsa-asg-5996_st2 | 7.97 | 8.69 | 8.72 | 0.77 | 67 | 8.10 | 7.67 | 5.28 | 7.68 | 8.03 | 7.00 | 6.23 | 6.39 | 3.77 | 6.68 | 1.44 | 0 | 4.47E−02 | −2.04 | 4.1 |
| hsa-asg-2299 | hsa-asg-2299_st1 | 5.45 | 5.46 | 5.66 | 0.36 | 67 | 4.71 | 4.16 | 4.54 | 3.63 | 3.44 | 3.59 | 3.40 | 2.27 | 2.92 | 3.63 | 0.77 | 0 | 1.50E−03 | −2.04 | 4.1 |
| hsa-asg-8266 | hsa-asg-8266_st2 | 6.21 | 6.62 | 6.35 | 0.23 | 100 | 4.17 | 3.83 | 4.61 | 5.23 | 4.45 | 4.75 | 4.49 | 3.44 | 3.87 | 4.32 | 0.55 | 0 | 1.15E−04 | −2.03 | 4.1 |
| hsa-asg-9553 | hsa-asg-9553_st1 | 4.22 | 2.95 | 4.64 | 1.94 | 33 | 2.78 | 3.23 | 0.79 | 4.15 | 3.39 | 3.32 | 2.92 | 1.02 | 2.44 | 2.67 | 1.11 | 0 | 4.85E−02 | −1.97 | 3.9 |
| hsa-asg-14048 | hsa-asg-14048_st1 | 6.27 | 6.26 | 6.26 | 0.01 | 67 | 4.43 | 4.95 | 3.54 | 3.63 | 5.03 | 3.26 | 4.59 | 5.15 | 4.07 | 4.29 | 0.70 | 0 | 8.80E−04 | −1.96 | 3.9 |
| hsa-asg-10775 | hsa-asg-10775_st2 | 7.03 | 6.54 | 6.71 | 0.28 | 100 | 5.11 | 4.76 | 4.81 | 5.06 | 4.36 | 4.68 | 4.82 | 4.52 | 4.73 | 4.76 | 0.23 | 0 | 2.95E−07 | −1.95 | 3.9 |
| hsa-miR-365 | hsa-cand708_st1 | 7.75 | 6.59 | 6.75 | 0.93 | 100 | 5.94 | 5.23 | 4.02 | 6.58 | 5.46 | 4.24 | 5.64 | 3.07 | 3.53 | 4.86 | 1.19 | 44 | 3.19E−02 | −1.90 | 3.7 |
| hsa-miR-365 | hsa-miR-365_st1 | 8.62 | 7.33 | 7.69 | 0.82 | 100 | 7.27 | 5.64 | 5.53 | 7.63 | 6.38 | 5.40 | 6.66 | 4.78 | 4.78 | 6.01 | 1.03 | 56 | 2.98E−02 | −1.68 | 3.2 |
| hsa-miR-365 | hsa-asg-13156_st1 | 8.91 | 7.47 | 7.69 | 1.14 | 100 | 7.33 | 5.87 | 6.09 | 7.37 | 6.38 | 5.46 | 6.63 | 4.78 | 4.67 | 6.06 | 0.98 | 56 | 3.73E−02 | −1.62 | 3.1 |
| hsa-asg-7751 | hsa-asg-7751_st2 | 5.39 | 4.77 | 5.33 | 0.54 | 33 | 2.93 | 3.74 | 3.39 | 2.77 | 5.07 | 5.13 | 4.07 | 1.68 | 2.33 | 3.46 | 1.17 | 0 | 2.57E−02 | −1.88 | 3.7 |
| hsa-asg-4069 | hsa-asg-4069_st1 | 6.05 | 4.19 | 5.98 | 1.76 | 33 | 4.31 | 4.93 | 2.76 | 4.46 | 4.30 | 4.97 | 4.14 | 3.59 | 3.92 | 4.15 | 0.68 | 0 | 2.02E−02 | −1.83 | 3.6 |
| hsa-asg-1451 | hsa-asg-1451_st1 | 5.32 | 6.06 | 5.32 | 0.74 | 33 | 3.66 | 2.71 | 4.12 | 2.69 | 3.44 | 3.87 | 2.92 | 4.47 | 3.87 | 3.53 | 0.63 | 0 | 2.13E−03 | −1.80 | 3.5 |
| hsa-asg-13077 | hsa-asg-13077_st1 | 5.91 | 6.47 | 6.57 | 0.72 | 100 | 5.98 | 5.12 | 3.23 | 5.27 | 6.03 | 5.05 | 4.54 | 3.91 | 3.97 | 4.79 | 0.95 | 44 | 1.49E−02 | −1.79 | 3.4 |
| hsa-asg-13800 | hsa-asg-13800_st2 | 4.36 | 4.49 | 4.91 | 0.83 | 33 | 4.24 | 3.64 | 3.79 | 3.15 | 3.10 | 3.48 | 1.25 | 2.78 | 2.74 | 3.13 | 0.86 | 0 | 1.06E−02 | −1.78 | 3.4 |
| hsa-asg-7540 | hsa-asg-7540_st2 | 5.98 | 5.56 | 5.81 | 0.22 | 67 | 3.76 | 4.43 | 3.06 | 3.52 | 4.14 | 4.97 | 3.93 | 4.47 | 3.97 | 4.03 | 0.56 | 0 | 4.11E−04 | −1.78 | 3.4 |
| hsa-asg-1301 | hsa-asg-1301_st1 | 5.63 | 5.96 | 5.56 | 0.44 | 100 | 4.49 | 3.74 | 3.91 | 3.73 | 3.81 | 3.69 | 4.20 | 3.83 | 2.92 | 3.81 | 0.42 | 0 | 1.10E−04 | −1.75 | 3.4 |
| hsa-miR-189 | hsa-miR-189_st1 | 7.57 | 6.64 | 7.07 | 0.47 | 100 | 6.08 | 5.79 | 4.93 | 7.23 | 6.18 | 4.55 | 4.94 | 3.54 | 4.95 | 5.36 | 1.08 | 44 | 2.71E−02 | −1.71 | 3.3 |
| hsa-asg-10830 | hsa-asg-10830_st2 | 6.17 | 5.35 | 5.62 | 0.48 | 67 | 4.37 | 4.00 | 3.67 | 3.91 | 3.93 | 4.49 | 3.40 | 3.64 | 3.87 | 3.92 | 0.35 | 0 | 4.94E−05 | −1.70 | 3.2 |
| hsa-miR-30a-3p | hsa-miR-30a-3p_st1 | 10.6 | 10.0 | 10.2 | 0.33 | 100 | 9.33 | 9.03 | 8.26 | 9.31 | 8.40 | 9.13 | 7.93 | 7.39 | 8.19 | 8.55 | 0.68 | 100 | 2.35E−03 | −1.69 | 3.2 |
| hsa-miR-29c | hsa-miR-29c_st2 | 11.2 | 10.4 | 10.9 | 0.42 | 100 | 10.0 | 9.44 | 9.16 | 9.78 | 9.72 | 7.50 | 8.94 | 8.77 | 9.53 | 9.21 | 0.76 | 100 | 4.92E−03 | −1.69 | 3.2 |
| hsa-asg-12356 | hsa-asg-12356_st1 | 8.24 | 9.20 | 9.06 | 0.76 | 100 | 7.95 | 8.62 | 5.85 | 7.75 | 8.67 | 8.30 | 6.83 | 7.02 | 6.03 | 7.45 | 1.06 | 78 | 3.73E−02 | −1.62 | 3.1 |
| hsa-asg-677 | hsa-asg-677_st2 | 5.17 | 5.39 | 5.68 | 0.70 | 33 | 3.45 | 4.71 | 3.91 | 4.15 | 5.07 | 4.80 | 3.68 | 4.14 | 2.74 | 4.07 | 0.73 | 0 | 7.75E−03 | −1.60 | 3.0 |
| hsa-asg-3009 | hsa-asg-3009_st1 | 5.77 | 6.04 | 6.37 | 0.82 | 33 | 5.18 | 5.62 | 4.34 | 5.21 | 5.43 | 5.05 | 3.50 | 4.44 | 4.20 | 4.78 | 0.69 | 0 | 7.80E−03 | −1.60 | 3.0 |
| hsa-asg-3376 | hsa-asg-3376_st1 | 5.58 | 5.06 | 5.44 | 0.34 | 33 | 3.85 | 3.02 | 4.87 | 4.66 | 4.00 | 4.18 | 2.48 | 4.21 | 3.39 | 3.85 | 0.77 | 0 | 6.99E−03 | −1.58 | 3.0 |
| hsa-asg-3597 | hsa-asg-3597_st2 | 7.70 | 8.11 | 8.18 | 0.52 | 100 | 6.64 | 7.77 | 5.06 | 6.88 | 7.77 | 6.98 | 6.69 | 5.98 | 5.80 | 6.62 | 0.89 | 78 | 1.80E−02 | −1.57 | 3.0 |
| hsa-asg-381 | hsa-asg-381_st1 | 5.05 | 3.53 | 4.88 | 1.27 | 33 | 3.07 | 3.64 | 3.06 | 3.68 | 3.85 | 3.37 | 3.50 | 3.32 | 2.54 | 3.34 | 0.40 | 0 | 6.20E−03 | −1.54 | 2.9 |
| hsa-miR-204 | hsa-miR-204_st2 | 8.51 | 7.05 | 7.70 | 0.74 | 100 | 7.18 | 5.82 | 5.98 | 8.21 | 6.76 | 5.46 | 5.19 | 5.42 | 5.78 | 6.20 | 0.99 | 44 | 3.85E−02 | −1.50 | 2.8 |
| hsa-asg-12990 | hsa-asg-12990_st1 | 2.96 | 2.47 | 3.65 | 1.64 | 33 | 2.61 | 2.71 | 2.43 | 1.93 | 2.37 | 2.17 | 2.48 | 2.27 | 0.73 | 2.19 | 0.59 | 0 | 3.58E−02 | −1.47 | 2.8 |
| hsa-asg-7471 | hsa-asg-7471_st1 | 7.01 | 7.01 | 7.12 | 0.19 | 100 | 5.60 | 5.72 | 5.67 | 6.74 | 5.70 | 5.30 | 5.25 | 5.00 | 6.09 | 5.68 | 0.51 | 56 | 9.23E−04 | −1.44 | 2.7 |
| hsa-asg-8476 | hsa-asg-8476_st1 | 7.42 | 7.51 | 7.48 | 0.05 | 33 | 5.60 | 6.42 | 6.43 | 6.33 | 5.78 | 6.22 | 6.76 | 5.42 | 5.63 | 6.06 | 0.47 | 11 | 4.80E−04 | −1.42 | 2.7 |
| hsa-miR-409-5p | hsa-miR-409-5p_st1 | 7.28 | 6.87 | 7.06 | 0.21 | 100 | 5.14 | 5.04 | 6.67 | 6.09 | 6.11 | 5.17 | 5.92 | 5.45 | 5.27 | 5.65 | 0.57 | 44 | 2.16E−03 | −1.41 | 2.7 |
| hsa-miR-620 | hsa-miR-620_st1 | 4.15 | 4.19 | 4.20 | 0.05 | 67 | 3.56 | 3.02 | 1.92 | 2.51 | 3.22 | 3.37 | 1.25 | 3.20 | 3.09 | 2.79 | 0.76 | 0 | 1.14E−02 | −1.40 | 2.6 |
| hsa-asg-3742 | hsa-asg-3742_st1 | 5.05 | 5.25 | 5.44 | 0.51 | 33 | 3.85 | 4.95 | 3.67 | 4.26 | 4.87 | 3.48 | 3.59 | 4.21 | 3.65 | 4.06 | 0.55 | 0 | 3.47E−03 | −1.38 | 2.6 |
| hsa-cand533 | hsa-cand533_st1 | 5.32 | 5.66 | 5.46 | 0.18 | 33 | 4.85 | 4.23 | 4.12 | 4.49 | 3.89 | 3.59 | 3.50 | 4.07 | 4.24 | 4.11 | 0.42 | 0 | 3.75E−04 | −1.35 | 2.5 |
| hsa-asg-12208 | hsa-asg-12208_st1 | 5.72 | 5.42 | 6.07 | 0.87 | 33 | 4.24 | 3.83 | 5.24 | 4.99 | 5.07 | 5.17 | 4.94 | 4.83 | 4.24 | 4.73 | 0.50 | 0 | 6.78E−03 | −1.34 | 2.5 |
| hsa-asg-4163 | hsa-asg-4163_st2 | 8.04 | 6.81 | 7.53 | 0.64 | 100 | 6.23 | 6.02 | 6.45 | 6.44 | 6.90 | 5.87 | 5.92 | 5.90 | 6.09 | 6.20 | 0.34 | 100 | 7.75E−04 | −1.33 | 2.5 |
| hsa-asg-3798 | hsa-asg-3798_st1 | 7.52 | 6.57 | 6.73 | 0.72 | 100 | 5.68 | 4.81 | 5.71 | 5.77 | 5.54 | 5.01 | 5.12 | 5.29 | 5.78 | 5.41 | 0.36 | 22 | 1.54E−03 | −1.32 | 2.5 |
| hsa-asg-414 | hsa-asg-414_st1 | 7.32 | 6.95 | 7.59 | 0.82 | 100 | 6.29 | 6.32 | 6.65 | 6.16 | 6.04 | 6.87 | 6.62 | 5.74 | 5.92 | 6.29 | 0.37 | 78 | 2.64E−03 | −1.30 | 2.5 |
| hsa-asg-3672 | hsa-asg-3672_st1 | 5.42 | 6.51 | 6.51 | 1.08 | 67 | 5.35 | 6.54 | 4.17 | 5.37 | 5.75 | 6.05 | 4.59 | 4.49 | 4.50 | 5.20 | 0.81 | 11 | 4.91E−02 | −1.30 | 2.5 |
| hsa-miR-30e-5p | hsa-miR-30e-5p_st2 | 11.6 | 10.3 | 10.8 | 0.69 | 100 | 10.4 | 9.64 | 9.71 | 10.5 | 9.81 | 9.23 | 9.23 | 8.15 | 9.50 | 9.58 | 0.70 | 100 | 1.94E−02 | −1.30 | 2.5 |
| hsa-cand283 | hsa-cand283_st1 | 6.95 | 5.91 | 6.47 | 0.52 | 67 | 5.45 | 6.14 | 4.68 | 5.56 | 4.74 | 5.63 | 5.25 | 4.58 | 4.54 | 5.17 | 0.57 | 33 | 5.90E−03 | −1.29 | 2.5 |
| hsa-miR-30c | hsa-miR-30c_st1 | 12.5 | 12.2 | 12.4 | 0.20 | 100 | 11.6 | 11.6 | 11.2 | 11.9 | 11.5 | 11.6 | 11.1 | 10.1 | 10.0 | 11.2 | 0.68 | 100 | 1.14E−02 | −1.26 | 2.4 |
| hsa-miR-95 | hsa-miR-95_st1 | 11.0 | 10.0 | 10.2 | 0.66 | 100 | 9.39 | 8.65 | 9.82 | 10.1 | 9.57 | 8.44 | 9.10 | 7.82 | 8.21 | 9.02 | 0.79 | 100 | 3.33E−02 | −1.26 | 2.4 |
| hsa-asg-12885 | hsa-asg-12885_st1 | 6.65 | 6.36 | 6.50 | 0.15 | 100 | 6.66 | 5.30 | 5.41 | 5.53 | 5.41 | 5.43 | 5.25 | 3.44 | 5.31 | 5.30 | 0.82 | 89 | 3.51E−02 | −1.20 | 2.3 |
| hsa-miR-27b | hsa-miR-27b_st1 | 13.7 | 13.3 | 13.4 | 0.21 | 100 | 12.5 | 12.3 | 12.0 | 13.2 | 12.8 | 11.9 | 11.9 | 11.0 | 12.5 | 12.2 | 0.64 | 100 | 1.11E−02 | −1.20 | 2.3 |
| hsa-cand443 | hsa-cand443_st2 | 5.60 | 5.31 | 5.77 | 0.57 | 67 | 3.93 | 5.15 | 3.91 | 4.49 | 5.76 | 5.27 | 4.86 | 3.83 | 4.32 | 4.61 | 0.69 | 33 | 2.57E−02 | −1.16 | 2.2 |
| hsa-asg-10626 | hsa-asg-10626_st2 | 6.15 | 6.45 | 6.00 | 0.54 | 100 | 5.14 | 5.19 | 4.61 | 5.37 | 4.99 | 4.31 | 4.86 | 4.28 | 5.00 | 4.86 | 0.39 | 0 | 2.31E−03 | −1.14 | 2.2 |
| hsa-miR-30b | hsa-miR-30b_st2 | 12.4 | 11.6 | 12.1 | 0.43 | 100 | 11.6 | 11.2 | 11.1 | 11.5 | 11.1 | 10.9 | 10.9 | 10.0 | 9.96 | 10.9 | 0.58 | 100 | 1.17E−02 | −1.14 | 2.2 |
| hsa-asg-1380 | hsa-asg-1380_st2 | 4.55 | 4.69 | 4.73 | 0.21 | 33 | 4.09 | 3.42 | 1.66 | 4.08 | 4.04 | 3.95 | 3.40 | 4.41 | 3.39 | 3.60 | 0.82 | 0 | 4.42E−02 | −1.13 | 2.2 |
| hsa-asg-259 | hsa-asg-259_st2 | 5.63 | 5.31 | 5.41 | 0.19 | 33 | 5.29 | 4.76 | 4.54 | 5.04 | 4.42 | 4.18 | 3.29 | 3.91 | 3.25 | 4.30 | 0.72 | 22 | 2.70E−02 | −1.11 | 2.2 |
| hsa-asg-3300 | hsa-asg-3300_st2 | 6.03 | 7.28 | 6.16 | 1.06 | 67 | 4.31 | 4.30 | 4.87 | 6.05 | 4.97 | 5.05 | 5.61 | 5.22 | 5.14 | 5.06 | 0.56 | 22 | 3.71E−02 | −1.10 | 2.1 |
| hsa-asg-2967 | hsa-asg-2967_st2 | 6.15 | 5.81 | 5.81 | 0.34 | 67 | 5.18 | 4.86 | 4.54 | 4.81 | 5.95 | 4.43 | 3.93 | 4.35 | 4.32 | 4.71 | 0.59 | 22 | 1.34E−02 | −1.10 | 2.1 |
| hsa-asg-9009 | hsa-asg-9009_st1 | 5.13 | 5.58 | 5.72 | 0.67 | 33 | 5.03 | 5.57 | 4.17 | 4.49 | 4.45 | 5.25 | 4.94 | 3.69 | 4.02 | 4.62 | 0.62 | 0 | 2.55E−02 | −1.10 | 2.1 |
| hsa-asg-12874 | hsa-asg-12874_st1 | 5.35 | 4.19 | 5.53 | 1.43 | 33 | 4.02 | 4.23 | 4.02 | 4.86 | 4.60 | 4.89 | 4.20 | 4.52 | 4.67 | 4.45 | 0.34 | 0 | 4.46E−02 | −1.08 | 2.1 |
| hsa-asg-2315 | hsa-asg-2315_st2 | 5.45 | 5.61 | 5.89 | 0.62 | 33 | 5.60 | 5.83 | 4.58 | 4.66 | 5.39 | 4.91 | 3.68 | 4.85 | 3.92 | 4.82 | 0.72 | 0 | 4.62E−02 | −1.06 | 2.1 |
| hsa-miR-148b | hsa-miR-148b_st2 | 10.7 | 9.42 | 10.2 | 0.71 | 100 | 10.0 | 8.79 | 9.44 | 10.0 | 9.63 | 8.27 | 9.09 | 8.14 | 9.14 | 9.18 | 0.70 | 100 | 4.68E−02 | −1.06 | 2.1 |
| hsa-asg-4448 | hsa-asg-4448_st1 | 7.21 | 6.87 | 7.00 | 0.19 | 100 | 6.73 | 6.14 | 5.98 | 7.05 | 6.17 | 5.01 | 6.26 | 4.87 | 5.31 | 5.95 | 0.75 | 67 | 4.13E−02 | −1.05 | 2.1 |
| hsa-asg-6616 | hsa-asg-6616_st1 | 6.74 | 6.48 | 7.00 | 0.68 | 100 | 5.42 | 5.69 | 6.55 | 6.54 | 5.50 | 6.00 | 5.29 | 6.05 | 6.75 | 5.98 | 0.54 | 78 | 2.28E−02 | −1.03 | 2.0 |
| hsa-asg-12807 | hsa-asg-12807_st2 | 6.50 | 7.28 | 6.97 | 0.41 | 100 | 5.89 | 5.96 | 6.99 | 6.57 | 5.61 | 5.05 | 5.05 | 6.49 | 6.00 | 5.96 | 0.66 | 78 | 3.38E−02 | −1.01 | 2.0 |

SD, standard deviation;
%, percentage of samples expressing miRNA above background levels;
Log2Diff, difference in VSN-transformed expression bewteen PAN and LNneg samples.

### Example 27

### miRNAs Differentally Expressed Between Normal Thyroid Tissue And Normal Lymph Nodes

[0319] To identify miRNAs that may be useful markers for metastasis of cancerous thyroid cells to lymph nodes, the inventors identified miRNAs that are expressed at significantly higher levels in normal thyroid tissue than in cancer-negative lymph nodes.

[0320] Total RNA, purified from one normal human thyroid sample (FirstChoice® Human Thyroid Total RNA, cat. no. AM6872; Ambion, Austin, Tex., USA) and from nine normal human lymph node samples (FirstChoice® Human Lymph Node Total RNA, cat. no. AM7894; Ambion, Austin, Tex., USA) was purchased from Ambion. miRNA purification and labeling and microarray expression analyses were performed as described above in Example 2.

[0321] The inventors identified 362 miRNAs (31 verified, 331 predicted) with significant differential expression between the normal thyroid sample and the normal lymph nodes (|log 2Diff| thyroid vs LN neg≧1 and p-value<0.05) (Table 26). Among the verified miRNAs, hsa-miR-206 was expressed more than 300-fold higher in the thyroid tissue; hsa-miR-133b, -499, and -133a were expressed between 50- and 100-fold higher in the thyroid sample; eleven miRNAs were expressed between 10- and 50-fold higher in the thyroid sample; and seven miRNAs were expressed between 5- and 10-fold higher in the thyroid tissue than in the normal lymph nodes. Among the predicted miRNAs, hsa-asg-4915-st1 and -2027-st1 were expressed between 25- and 40-fold higher in the thyroid tissue sample; 19 miRNAs were expressed between 10- and 20-fold higher in the thyroid sample; and 112 miRNAs were expressed between 5- and 10-fold higher in the thyroid sample than in normal lymph nodes.

TABLE 26
MicroRNAs Differentially Expressed Between Normal Thyroid (THY) and
Cancer-Negative Lymph Node Samples (LNneg) from Patients.

| | | | LNneg | | | | | | | | |
|---|---|---|---|---|---|---|---|---|---|---|---|
| Micro RNA | Probe ID | THY | 1 | 2 | 3 | 4 | 5 | 6 | 7 | 8 | 9 |
| hsa-miR-206 | hsa-miR-206_st2 | 13.83 | 4.07 | 4.94 | 1.89 | 9.39 | 3.93 | 5.79 | 8.45 | 4.44 | 4.97 |
| hsa-miR-133b | hsa-miR-133b_st2 | 12.92 | 7.35 | 6.17 | 4.46 | 10.1 | 7.42 | 6.15 | 7.20 | 4.44 | 5.36 |
| hsa-miR-499 | hsa-miR12_st1 | 11.17 | 5.44 | 4.76 | 5.37 | 6.66 | 4.07 | 4.38 | 4.80 | 4.55 | 3.84 |
| hsa-miR-499 | hsa-miR-499_st1 | 10.99 | 5.31 | 4.61 | 4.75 | 6.57 | 4.49 | 4.12 | 5.03 | 4.25 | 4.58 |
| hsa-miR-133a | hsa-miR-133a_st1 | 13.35 | 7.76 | 7.65 | 5.93 | 10.8 | 8.16 | 7.08 | 8.20 | 6.23 | 6.46 |
| hsa-asg-4915_st1 | hsa-asg-4915_st1 | 8.12 | 2.41 | 3.78 | 2.15 | 2.57 | 3.59 | 2.87 | 2.77 | 2.05 | 4.44 |
| hsa-miR-429 | hsa-miR-429_st1 | 8.00 | 3.42 | 1.54 | 3.66 | 2.10 | 2.33 | 2.65 | 2.31 | 2.41 | 5.36 |
| hsa-miR-200b | hsa-miR-200b_st1 | 12.55 | 7.61 | 7.75 | 8.91 | 6.69 | 6.79 | 6.82 | 6.50 | 7.64 | 10.4 |
| hsa-asg-2027_st1 | hsa-asg-2027_st1 | 8.72 | 3.53 | 3.48 | 1.63 | 5.22 | 4.44 | 4.19 | 4.25 | 4.19 | 4.51 |
| hsa-miR-200a | hsa-miR-200a_st2 | 9.99 | 6.26 | 5.02 | 6.49 | 5.71 | 5.25 | 4.54 | 4.05 | 4.75 | 7.76 |
| hsa-miR-200c | hsa-miR-200c_st1 | 13.25 | 9.59 | 8.79 | 10.31 | 8.17 | 8.12 | 8.08 | 7.96 | 8.87 | 11.5 |
| hsa-asg-2399_st2 | hsa-asg-2399_st2 | 6.52 | 3.05 | 3.36 | 2.84 | 2.98 | 2.16 | 2.49 | 1.09 | 2.23 | 2.51 |
| hsa-miR-605 | hsa-miR-605_st1 | 6.48 | 2.58 | 2.13 | 3.04 | 0.73 | 1.71 | 2.14 | 2.90 | 3.03 | 4.44 |
| hsa-asg-14153_st2 | hsa-asg-14153_st2 | 6.62 | 3.05 | 2.23 | 3.04 | 2.98 | 2.33 | 2.65 | 1.17 | 2.74 | 4.37 |
| hsa-asg-11715_st2 | hsa-asg-11715_st2 | 5.66 | 1.83 | 2.32 | 2.15 | 1.48 | 2.07 | 1.76 | 0.63 | 1.46 | 3.36 |
| hsa-asg-2484_st2 | hsa-asg-2484_st2 | 6.28 | 2.41 | 2.32 | 1.37 | 3.98 | 2.16 | 2.32 | 3.38 | 2.74 | 2.51 |
| hsa-asg-3983_st1 | hsa-asg-3983_st1 | 9.47 | 4.50 | 6.67 | 5.37 | 5.39 | 6.02 | 6.97 | 4.98 | 5.76 | 6.31 |
| hsa-asg-6283_st1 | hsa-asg-6283_st1 | 7.88 | 3.83 | 5.43 | 3.30 | 4.59 | 6.32 | 5.16 | 4.96 | 2.14 | 1.95 |
| hsa-miR-368 | hsa-miR-368_st2 | 9.90 | 6.48 | 6.47 | 7.70 | 8.08 | 7.68 | 5.18 | 5.62 | 3.97 | 5.07 |
| hsa-asg-4209_st2 | hsa-asg-4209_st2 | 7.87 | 4.22 | 4.96 | 3.59 | 4.28 | 5.42 | 5.13 | 2.90 | 3.10 | 4.41 |
| hsa-miR-381 | hsa-miR-381_st2 | 6.73 | 2.75 | 2.32 | 4.21 | 3.38 | 4.17 | 2.94 | 3.48 | 1.28 | 3.22 |
| hsa-miR-203 | hsa-miR-203_st2 | 10.40 | 7.32 | 5.84 | 7.22 | 8.24 | 6.42 | 5.36 | 5.17 | 6.05 | 9.34 |
| hsa-asg-10309_st1 | hsa-asg-10309_st1 | 7.81 | 5.24 | 5.74 | 2.15 | 4.65 | 6.00 | 4.96 | 3.91 | 3.03 | 2.29 |
| hsa-asg-2345_st2 | hsa-asg-2345_st2 | 5.94 | 1.63 | 2.50 | 2.40 | 3.60 | 1.44 | 2.49 | 3.15 | 2.58 | 1.36 |
| hsa-asg-10393_st1 | hsa-asg-10393_st1 | 6.25 | 2.75 | 1.54 | 2.40 | 3.89 | 2.79 | 2.80 | 1.78 | 3.51 | 2.51 |
| hsa-cand14_st1 | hsa-cand14_st1 | 5.75 | 1.83 | 1.54 | 1.37 | 2.10 | 2.79 | 1.95 | 2.31 | 2.41 | 3.50 |
| hsa-asg-1375_st1 | hsa-asg-1375_st1 | 9.62 | 6.84 | 7.16 | 5.37 | 6.52 | 6.89 | 7.05 | 5.17 | 4.93 | 5.07 |
| hsa-asg-12172_st2 | hsa-asg-12172_st2 | 10.04 | 7.63 | 7.50 | 5.12 | 7.19 | 7.33 | 7.64 | 5.90 | 5.85 | 4.67 |
| hsa-asg-6178_st2 | hsa-asg-6178_st2 | 5.75 | 2.41 | 3.36 | 2.40 | 3.80 | 2.16 | 1.21 | 0.78 | 2.23 | 2.29 |
| hsa-miR-539 | hsa-miR177_st1 | 5.61 | 2.58 | 2.50 | 1.37 | 2.39 | 1.80 | 1.86 | 3.48 | 1.66 | 2.07 |
| hsa-miR-539 | hsa-miR-539_st1 | 5.71 | 2.03 | 3.11 | 2.63 | 3.38 | 2.65 | 2.94 | 1.96 | 2.58 | 1.36 |
| hsa-asg-3473_st1 | hsa-asg-3473_st1 | 9.26 | 6.78 | 7.18 | 3.90 | 5.98 | 6.79 | 6.97 | 5.09 | 5.11 | 4.82 |
| hsa-asg-6623_st2 | hsa-asg-6623_st2 | 9.38 | 6.75 | 7.18 | 5.17 | 6.10 | 6.99 | 6.50 | 5.00 | 5.55 | 4.67 |
| hsa-asg-3081_st1 | hsa-asg-3081_st1 | 7.36 | 4.74 | 4.44 | 3.21 | 4.28 | 5.72 | 4.49 | 3.75 | 3.88 | 1.36 |
| hsa-miR-141 | hsa-miR-141_st1 | 7.49 | 5.05 | 3.78 | 4.93 | 4.41 | 4.36 | 2.80 | 3.83 | 3.80 | 4.51 |
| hsa-asg-12142_st1 | hsa-asg-12142_st1 | 5.61 | 2.58 | 2.67 | 2.15 | 3.50 | 1.80 | 1.76 | 2.77 | 1.09 | 2.29 |
| hsa-asg-1020_st2 | hsa-asg-1020_st2 | 9.21 | 6.39 | 7.36 | 3.45 | 6.17 | 7.05 | 6.87 | 5.90 | 5.18 | 4.90 |
| hsa-asg-3743_st1 | hsa-asg-3743_st1 | 6.42 | 3.18 | 4.28 | 3.30 | 3.25 | 3.45 | 2.87 | 2.14 | 2.32 | 3.89 |
| hsa-asg-1826_st2 | hsa-asg-1826_st2 | 5.94 | 3.31 | 2.97 | 2.15 | 3.55 | 2.49 | 2.14 | 2.90 | 3.10 | 1.83 |
| hsa-asg-4116_st2 | hsa-asg-4116_st2 | 9.24 | 6.75 | 7.35 | 4.96 | 6.31 | 6.91 | 6.72 | 5.49 | 4.87 | 4.79 |
| hsa-asg-924_st1 | hsa-asg-924_st1 | 6.58 | 4.64 | 4.25 | 3.38 | 4.44 | 2.65 | 2.73 | 2.14 | 2.74 | 3.50 |
| hsa-asg-555_st1 | hsa-asg-555_st1 | 9.79 | 7.33 | 7.85 | 5.31 | 6.60 | 7.12 | 7.27 | 5.33 | 6.32 | 6.24 |
| hsa-asg-9920_st1 | hsa-asg-9920_st1 | 10.45 | 8.07 | 8.33 | 6.09 | 7.77 | 8.07 | 7.77 | 6.61 | 6.76 | 6.38 |
| hsa-asg-20_st1 | hsa-asg-20_st1 | 5.89 | 3.91 | 3.91 | 1.00 | 3.50 | 3.81 | 3.48 | 1.42 | 2.32 | 1.48 |
| hsa-asg-1296_st1 | hsa-asg-1296_st1 | 6.36 | 3.05 | 2.50 | 4.81 | 2.39 | 2.49 | 2.73 | 3.15 | 3.88 | 4.13 |
| hsa-asg-10250_st1 | hsa-asg-10250_st1 | 5.16 | 1.83 | 2.13 | 1.12 | 2.10 | 2.79 | 1.76 | 3.48 | 2.05 | 1.14 |
| hsa-asg-4037_st1 | hsa-asg-4037_st1 | 5.62 | 2.75 | 2.32 | 1.89 | 3.50 | 3.35 | 2.32 | 2.31 | 1.85 | 2.29 |
| hsa-asg-8242_st2 | hsa-asg-8242_st2 | 6.22 | 2.75 | 3.53 | 1.37 | 4.35 | 4.20 | 4.43 | 3.43 | 1.66 | 2.29 |
| hsa-asg-1699_st2 | hsa-asg-1699_st2 | 10.35 | 8.48 | 8.85 | 6.17 | 7.49 | 7.64 | 8.30 | 5.85 | 6.03 | 6.42 |
| hsa-asg-7637_st2 | hsa-asg-7637_st2 | 6.84 | 3.64 | 2.50 | 4.46 | 3.44 | 3.89 | 3.97 | 3.27 | 3.61 | 5.24 |
| hsa-asg-1765_st1 | hsa-asg-1765_st1 | 5.59 | 2.22 | 2.13 | 2.84 | 3.60 | 2.33 | 2.32 | 3.27 | 2.23 | 2.07 |
| hsa-asg-9512_st1 | hsa-asg-9512_st1 | 9.25 | 6.41 | 6.89 | 4.61 | 6.57 | 7.78 | 7.00 | 6.35 | 5.27 | 5.20 |
| hsa-asg-12139_st2 | hsa-asg-12139_st2 | 5.34 | 2.75 | 2.32 | 2.63 | 2.30 | 1.62 | 2.14 | 1.60 | 2.05 | 3.50 |
| hsa-asg-7751_st2 | hsa-asg-7751_st2 | 6.42 | 2.90 | 3.68 | 3.38 | 2.74 | 5.03 | 5.07 | 4.05 | 1.66 | 2.29 |
| hsa-asg-7292_st1 | hsa-asg-7292_st1 | 10.73 | 8.54 | 8.83 | 6.92 | 7.90 | 7.96 | 8.42 | 6.87 | 7.27 | 6.96 |
| hsa-asg-128_st2 | hsa-asg-128_st2 | 7.56 | 4.84 | 4.71 | 4.54 | 5.11 | 4.52 | 4.12 | 4.96 | 4.32 | 4.13 |
| hsa-asg-7550_st1 | hsa-asg-7550_st1 | 6.38 | 3.42 | 4.52 | 2.28 | 4.82 | 3.06 | 3.53 | 2.90 | 2.66 | 3.43 |
| hsa-miR-376a | hsa-miR-376a_st2 | 7.30 | 5.13 | 4.03 | 5.49 | 5.66 | 4.82 | 3.97 | 2.47 | 3.80 | 3.73 |
| hsa-miR-376a | hsa-asg-10049_st1 | 7.69 | 5.01 | 4.85 | 6.09 | 5.55 | 5.31 | 4.05 | 3.83 | 4.12 | 4.64 |
| hsa-miR-376a | hsa-asg-14234_st1 | 6.30 | 3.31 | 4.25 | 3.38 | 3.98 | 4.82 | 3.63 | 2.90 | 4.04 | 1.83 |
| hsa-asg-10131_st2 | hsa-asg-10131_st2 | 6.13 | 3.31 | 3.11 | 3.52 | 2.48 | 2.49 | 3.20 | 2.62 | 3.17 | 5.07 |
| hsa-asg-13070_st1 | hsa-asg-13070_st1 | 5.44 | 2.90 | 2.50 | 2.63 | 4.14 | 3.06 | 2.14 | 2.31 | 1.85 | 1.36 |
| hsa-miR-95 | hsa-miR-95_st1 | 11.89 | 9.38 | 8.60 | 9.83 | 10.1 | 9.54 | 8.39 | 9.08 | 7.80 | 8.19 |
| hsa-asg-4864_st1 | hsa-asg-4864_st1 | 9.22 | 6.95 | 7.68 | 5.26 | 6.60 | 6.98 | 7.46 | 5.82 | 6.31 | 4.08 |
| hsa-asg-3597_st2 | hsa-asg-3597_st2 | 9.46 | 6.62 | 7.72 | 5.07 | 6.87 | 7.74 | 6.93 | 6.67 | 5.96 | 5.77 |
| hsa-asg-9201_st2 | hsa-asg-9201_st2 | 8.33 | 6.88 | 6.16 | 4.25 | 5.61 | 5.85 | 6.11 | 4.57 | 5.18 | 4.67 |
| hsa-asg-8079_st1 | hsa-asg-8079_st1 | 7.57 | 5.05 | 6.14 | 3.72 | 4.17 | 5.51 | 5.11 | 3.66 | 3.75 | 5.30 |
| hsa-miR-135b | hsa-miR-135b_st2 | 5.41 | 1.43 | 2.67 | 2.40 | 2.82 | 2.33 | 3.08 | 3.27 | 2.23 | 2.89 |
| hsa-miR-135b | hsa-cand78_st1 | 5.34 | 3.42 | 2.50 | 3.66 | 4.14 | 3.68 | 2.80 | 3.57 | 1.66 | 3.22 |
| hsa-asg-13888_st2 | hsa-asg-13888_st2 | 5.07 | 1.43 | 2.83 | 1.63 | 3.12 | 1.80 | 2.14 | 2.62 | 1.85 | 2.71 |
| hsa-asg-11777_st1 | hsa-asg-11777_st1 | 5.32 | 2.58 | 2.13 | 1.89 | 3.60 | 1.98 | 1.95 | 2.90 | 2.23 | 3.06 |
| hsa-miR-138 | hsa-miR-138_st1 | 8.41 | 6.36 | 5.68 | 6.82 | 6.41 | 5.91 | 4.57 | 4.92 | 4.87 | 5.09 |
| hsa-asg-10080_st1 | hsa-asg-10080_st1 | 5.07 | 2.03 | 1.74 | 2.40 | 1.79 | 2.33 | 2.40 | 2.47 | 2.23 | 3.36 |
| hsa-asg-5119_st1 | hsa-asg-5119_st1 | 5.27 | 2.41 | 2.67 | 1.89 | 1.90 | 1.98 | 2.49 | 2.90 | 2.58 | 3.62 |
| hsa-asg-9082_st1 | hsa-asg-9082_st1 | 5.75 | 2.75 | 4.47 | 1.24 | 2.90 | 3.06 | 3.63 | 2.47 | 3.56 | 2.80 |
| hsa-asg-5728_st2 | hsa-asg-5728_st2 | 9.11 | 6.01 | 7.42 | 5.43 | 6.29 | 6.37 | 7.04 | 5.60 | 6.37 | 6.65 |
| hsa-asg-5189_st2 | hsa-asg-5189_st2 | 10.60 | 8.62 | 9.20 | 6.50 | 8.16 | 8.47 | 8.78 | 7.08 | 7.31 | 6.63 |
| hsa-asg-677_st2 | hsa-asg-677_st2 | 6.78 | 3.42 | 4.66 | 3.90 | 4.14 | 5.03 | 4.74 | 3.66 | 4.12 | 2.71 |
| hsa-asg-13077_st1 | hsa-asg-13077_st1 | 7.49 | 5.97 | 5.06 | 3.21 | 5.26 | 6.00 | 5.00 | 4.52 | 3.88 | 3.94 |
| hsa-asg-3822_st2 | hsa-asg-3822_st2 | 5.44 | 2.03 | 2.97 | 3.66 | 2.00 | 2.41 | 2.14 | 1.60 | 2.89 | 4.76 |
| hsa-asg-388_st1 | hsa-asg-388_st1 | 11.05 | 8.93 | 9.43 | 7.28 | 8.68 | 9.28 | 9.11 | 7.66 | 7.82 | 6.83 |
| hsa-asg-13083_st1 | hsa-asg-13083_st1 | 10.46 | 8.14 | 9.03 | 6.45 | 8.11 | 8.52 | 8.71 | 6.85 | 7.26 | 6.66 |
| hsa-asg-11235_st2 | hsa-asg-11235_st2 | 7.98 | 6.32 | 6.74 | 3.90 | 5.34 | 5.55 | 5.60 | 3.75 | 5.09 | 5.20 |
| hsa-miR-424 | hsa-miR-424_st1 | 8.38 | 5.79 | 6.11 | 5.53 | 5.91 | 5.75 | 3.43 | 5.80 | 5.70 | 7.21 |
| hsa-miR-450 | hsa-asg-14228_st2 | 5.46 | 3.53 | 2.13 | 2.40 | 2.98 | 2.49 | 3.08 | 2.90 | 2.89 | 2.71 |
| hsa-miR-450 | hsa-miR-450_st2 | 6.15 | 4.22 | 2.67 | 2.84 | 3.89 | 3.59 | 3.97 | 4.18 | 4.44 | 4.04 |
| hsa-asg-1898_st1 | hsa-asg-1898_st1 | 8.18 | 5.61 | 6.38 | 4.42 | 5.74 | 6.01 | 6.65 | 4.31 | 5.55 | 5.00 |
| hsa-asg-8542_st2 | hsa-asg-8542_st2 | 11.32 | 9.38 | 10.13 | 8.18 | 8.70 | 8.93 | 9.60 | 7.50 | 7.92 | 7.64 |
| hsa-asg-13559_st2 | hsa-asg-13559_st2 | 8.91 | 7.01 | 7.56 | 5.01 | 6.55 | 6.95 | 7.23 | 5.41 | 5.41 | 5.22 |
| hsa-asg-12356_st1 | hsa-asg-12356_st1 | 10.05 | 7.94 | 8.57 | 5.85 | 7.74 | 8.64 | 8.25 | 6.82 | 7.01 | 6.01 |
| hsa-asg-12996_st1 | hsa-asg-12996_st1 | 8.56 | 6.75 | 7.50 | 5.09 | 5.79 | 6.82 | 6.55 | 5.07 | 5.16 | 4.76 |
| hsa-asg-9547_st2 | hsa-asg-9547_st2 | 6.58 | 3.53 | 4.90 | 3.78 | 3.32 | 3.40 | 3.85 | 3.38 | 4.25 | 5.32 |
| hsa-asg-4978_st2 | hsa-asg-4978_st2 | 5.07 | 1.63 | 2.83 | 2.84 | 1.69 | 1.98 | 1.95 | 2.77 | 2.58 | 4.13 |
| hsa-asg-3998_st1 | hsa-asg-3998_st1 | 11.31 | 8.62 | 8.53 | 8.70 | 9.41 | 8.74 | 8.32 | 9.20 | 8.74 | 8.47 |
| hsa-asg-8683_st1 | hsa-asg-8683_st1 | 9.01 | 6.85 | 7.08 | 5.69 | 6.74 | 7.33 | 7.60 | 5.27 | 5.81 | 5.86 |
| hsa-asg-378_st1 | hsa-asg-378_st1 | 5.24 | 2.22 | 2.67 | 2.15 | 4.70 | 2.79 | 2.94 | 1.09 | 2.74 | 3.06 |
| hsa-asg-3009_st1 | hsa-asg-3009_st1 | 7.28 | 5.17 | 5.57 | 4.34 | 5.20 | 5.40 | 5.00 | 3.48 | 4.41 | 4.17 |
| hsa-asg-6139_st2 | hsa-asg-6139_st2 | 4.83 | 3.18 | 2.67 | 1.63 | 1.48 | 2.99 | 2.14 | 1.78 | 2.41 | 2.51 |
| hsa-asg-2424_st1 | hsa-asg-2424_st1 | 4.36 | 2.22 | 1.15 | 1.12 | 1.79 | 1.27 | 1.86 | 2.62 | 1.66 | 2.89 |
| hsa-asg-9453_st2 | hsa-asg-9453_st2 | 9.45 | 7.57 | 8.10 | 6.21 | 6.88 | 7.39 | 7.53 | 6.23 | 6.75 | 5.76 |
| hsa-asg-13387_st1 | hsa-asg-13387_st1 | 6.85 | 5.34 | 5.46 | 3.30 | 3.75 | 3.93 | 5.43 | 3.91 | 4.82 | 3.14 |
| hsa-asg-1273_st2 | hsa-asg-1273_st2 | 9.67 | 7.75 | 8.42 | 6.19 | 7.31 | 8.12 | 8.13 | 6.46 | 6.65 | 5.47 |
| hsa-asg-4903_st2 | hsa-asg-4903_st2 | 9.95 | 8.51 | 8.25 | 6.62 | 7.71 | 7.98 | 8.37 | 6.85 | 7.07 | 5.67 |
| hsa-asg-11698_st2 | hsa-asg-11698_st2 | 10.49 | 8.56 | 9.32 | 6.82 | 7.99 | 8.60 | 9.03 | 7.39 | 7.89 | 6.36 |
| hsa-asg-8293_st2 | hsa-asg-8293_st2 | 8.96 | 7.00 | 7.28 | 4.93 | 6.25 | 7.31 | 7.08 | 5.89 | 6.49 | 5.97 |
| hsa-asg-7472_st2 | hsa-asg-7472_st2 | 4.45 | 1.63 | 2.13 | 1.89 | 2.00 | 2.86 | 1.76 | 3.57 | 0.92 | 0.93 |
| hsa-asg-12289_st1 | hsa-asg-12289_st1 | 11.49 | 9.46 | 9.97 | 8.18 | 9.09 | 9.82 | 9.68 | 8.23 | 8.88 | 7.88 |
| hsa-asg-1270_st2 | hsa-asg-1270_st2 | 6.10 | 4.22 | 3.58 | 1.89 | 4.06 | 4.54 | 4.83 | 3.03 | 3.29 | 3.22 |
| hsa-asg-1751_st2 | hsa-asg-1751_st2 | 10.38 | 8.85 | 9.28 | 7.18 | 7.91 | 8.35 | 8.81 | 6.89 | 7.41 | 6.59 |
| hsa-asg-6948_st2 | hsa-asg-6948_st2 | 9.98 | 8.49 | 8.47 | 6.62 | 7.52 | 8.31 | 8.11 | 6.73 | 6.80 | 6.68 |
| hsa-asg-3933_st1 | hsa-asg-3933_st1 | 9.37 | 7.72 | 7.86 | 5.84 | 7.23 | 7.63 | 7.91 | 5.91 | 6.65 | 5.54 |
| hsa-miR-422a | hsa-miR-422a_st1 | 11.64 | 9.09 | 8.97 | 9.17 | 9.80 | 8.95 | 8.80 | 9.67 | 9.22 | 9.12 |
| hsa-asg-8541_st1 | hsa-asg-8541_st1 | 10.88 | 9.14 | 9.54 | 7.73 | 8.56 | 8.78 | 8.85 | 7.82 | 7.83 | 7.89 |
| hsa-asg-3230_st1 | hsa-asg-3230_st1 | 9.02 | 7.15 | 7.96 | 5.35 | 6.84 | 6.81 | 7.35 | 6.04 | 5.66 | 6.22 |
| hsa-asg-7020_st1 | hsa-asg-7020_st1 | 4.41 | 1.63 | 2.32 | 1.89 | 1.59 | 1.53 | 2.32 | 1.96 | 2.58 | 2.07 |
| hsa-asg-6813_st2 | hsa-asg-6813_st2 | 6.83 | 4.41 | 5.72 | 4.11 | 3.60 | 5.02 | 5.25 | 3.48 | 3.71 | 4.51 |
| hsa-asg-3742_st1 | hsa-asg-3742_st1 | 6.44 | 3.83 | 4.90 | 3.66 | 4.25 | 4.84 | 3.43 | 3.57 | 4.19 | 3.62 |
| hsa-asg-11802_st1 | hsa-asg-11802_st1 | 9.39 | 7.71 | 8.25 | 6.01 | 7.20 | 7.73 | 7.92 | 5.85 | 6.37 | 5.84 |
| hsa-asg-9434_st2 | hsa-asg-9434_st2 | 8.74 | 6.68 | 6.97 | 5.35 | 6.60 | 7.28 | 6.88 | 5.90 | 5.81 | 5.62 |
| hsa-asg-6277_st2 | hsa-asg-6277_st2 | 8.38 | 6.88 | 6.93 | 5.07 | 5.94 | 6.46 | 6.96 | 4.92 | 6.32 | 4.54 |
| hsa-asg-7527_st2 | hsa-asg-7527_st2 | 6.58 | 4.59 | 5.00 | 2.74 | 3.12 | 4.92 | 4.81 | 4.42 | 4.01 | 4.25 |
| hsa-asg-9382_st2 | hsa-asg-9382_st2 | 8.77 | 6.79 | 7.25 | 5.66 | 6.65 | 6.89 | 7.40 | 5.78 | 5.78 | 5.38 |
| hsa-asg-1619_st2 | hsa-asg-1619_st2 | 5.66 | 4.35 | 3.24 | 2.84 | 4.80 | 3.12 | 2.80 | 2.31 | 3.03 | 3.22 |
| hsa-asg-960_st1 | hsa-asg-960_st1 | 10.15 | 8.36 | 8.91 | 6.34 | 8.10 | 8.38 | 8.52 | 7.02 | 7.41 | 7.16 |
| hsa-asg-12526_st1 | hsa-asg-12526_st1 | 6.39 | 4.29 | 5.16 | 3.13 | 3.85 | 3.18 | 5.21 | 3.15 | 4.73 | 3.68 |
| hsa-asg-8305_st2 | hsa-asg-8305_st2 | 9.05 | 7.08 | 7.55 | 5.43 | 6.98 | 7.47 | 7.34 | 5.84 | 6.92 | 5.74 |
| hsa-cand443_st2 | hsa-cand443_st2 | 6.93 | 3.91 | 5.10 | 3.90 | 4.48 | 5.73 | 5.21 | 4.84 | 3.80 | 4.29 |
| hsa-asg-6068_st2 | hsa-asg-6068_st2 | 7.58 | 5.79 | 5.86 | 4.93 | 5.24 | 6.08 | 5.98 | 4.12 | 4.89 | 4.29 |
| hsa-asg-12016_st2 | hsa-asg-12016_st2 | 4.79 | 3.18 | 2.67 | 1.63 | 2.98 | 1.71 | 1.57 | 1.96 | 2.41 | 4.04 |
| hsa-asg-2314_st1 | hsa-asg-2314_st1 | 8.46 | 6.19 | 7.09 | 5.21 | 6.42 | 6.25 | 6.53 | 5.98 | 5.47 | 6.11 |
| hsa-asg-9514_st1 | hsa-asg-9514_st1 | 5.75 | 2.58 | 4.50 | 3.21 | 2.48 | 4.33 | 3.63 | 4.18 | 2.58 | 3.36 |
| hsa-asg-11320_st2 | hsa-asg-11320_st2 | 6.52 | 4.88 | 4.44 | 4.11 | 4.10 | 4.36 | 4.05 | 3.83 | 3.97 | 4.21 |
| hsa-asg-13878_st2 | hsa-asg-13878_st2 | 5.51 | 2.90 | 3.48 | 2.84 | 4.82 | 4.24 | 3.32 | 3.03 | 2.41 | 1.83 |
| hsa-asg-2195_st1 | hsa-asg-2195_st1 | 11.52 | 9.78 | 10.13 | 8.17 | 9.47 | 10.16 | 10.1 | 8.63 | 8.95 | 7.80 |
| hsa-asg-3614_st1 | hsa-asg-3614_st1 | 6.76 | 4.79 | 5.36 | 3.59 | 4.38 | 4.00 | 5.11 | 3.83 | 4.73 | 4.61 |
| hsa-asg-11361_st2 | hsa-asg-11361_st2 | 5.65 | 2.75 | 3.48 | 3.38 | 3.25 | 3.59 | 3.32 | 3.83 | 2.58 | 4.29 |
| hsa-asg-2580_st1 | hsa-asg-2580_st1 | 9.51 | 7.63 | 8.03 | 6.56 | 6.91 | 7.71 | 7.44 | 6.22 | 6.68 | 8.07 |
| hsa-asg-6637_st1 | hsa-asg-6637_st1 | 9.33 | 7.33 | 8.19 | 6.25 | 6.81 | 7.42 | 7.68 | 6.05 | 7.04 | 6.91 |
| hsa-asg-5163_st1 | hsa-asg-5163_st1 | 9.69 | 8.27 | 8.57 | 6.97 | 7.10 | 7.75 | 8.41 | 6.49 | 7.19 | 6.27 |
| hsa-asg-8174_st1 | hsa-asg-8174_st1 | 5.45 | 3.31 | 4.03 | 2.84 | 2.98 | 2.86 | 3.20 | 2.77 | 2.74 | 4.13 |
| hsa-asg-9053_st1 | hsa-asg-9053_st1 | 8.09 | 5.86 | 6.50 | 4.78 | 6.21 | 6.07 | 6.86 | 4.88 | 5.90 | 5.62 |
| hsa-asg-7250_st1 | hsa-asg-7250_st1 | 6.01 | 4.00 | 4.83 | 2.52 | 3.32 | 4.59 | 3.97 | 3.15 | 4.41 | 3.14 |
| hsa-asg-3545_st1 | hsa-asg-3545_st1 | 9.49 | 7.20 | 8.47 | 6.69 | 6.99 | 7.91 | 8.05 | 6.21 | 7.08 | 6.81 |
| hsa-asg-3672_st1 | hsa-asg-3672_st1 | 7.40 | 5.34 | 6.49 | 4.16 | 5.36 | 5.72 | 5.99 | 4.57 | 4.47 | 4.48 |
| hsa-asg-3912_st1 | hsa-asg-3912_st1 | 4.50 | 1.63 | 2.50 | 2.84 | 1.59 | 2.16 | 1.21 | 2.90 | 2.14 | 3.50 |
| hsa-asg-9830_st2 | hsa-asg-9830_st2 | 4.88 | 3.05 | 2.50 | 1.89 | 2.20 | 2.16 | 2.23 | 3.48 | 2.23 | 4.21 |
| hsa-asg-13741_st2 | hsa-asg-13741_st2 | 4.16 | 0.15 | 2.50 | 1.89 | 2.57 | 1.89 | 2.49 | 1.42 | 1.46 | 3.06 |
| hsa-asg-11626_st1 | hsa-asg-11626_st1 | 9.10 | 7.37 | 7.81 | 6.18 | 7.35 | 7.77 | 7.30 | 6.35 | 6.21 | 5.77 |
| hsa-asg-9009_st1 | hsa-asg-9009_st1 | 6.80 | 5.01 | 5.52 | 4.16 | 4.48 | 4.41 | 5.20 | 4.92 | 3.66 | 3.99 |
| hsa-asg-7439_st1 | hsa-asg-7439_st1 | 7.26 | 4.15 | 6.57 | 3.90 | 4.94 | 5.03 | 6.06 | 4.31 | 4.93 | 5.70 |
| hsa-asg-10360_st1 | hsa-asg-10360_st1 | 5.48 | 3.42 | 3.36 | 3.04 | 4.65 | 3.68 | 3.20 | 3.15 | 2.41 | 2.71 |
| hsa-asg-4140_st2 | hsa-asg-4140_st2 | 5.77 | 3.42 | 3.48 | 3.21 | 4.35 | 3.77 | 3.43 | 4.12 | 3.71 | 2.71 |
| hsa-cand266_st1 | hsa-cand266_st1 | 8.56 | 6.73 | 7.20 | 5.49 | 7.08 | 6.90 | 7.03 | 5.86 | 5.97 | 5.16 |
| hsa-asg-11160_st2 | hsa-asg-11160_st2 | 5.39 | 2.75 | 3.11 | 3.38 | 3.05 | 2.86 | 2.65 | 2.47 | 3.51 | 5.11 |
| hsa-asg-1040_st2 | hsa-asg-1040_st2 | 7.96 | 6.50 | 6.63 | 4.25 | 5.76 | 6.17 | 6.28 | 5.47 | 5.47 | 5.49 |
| hsa-asg-2615_st2 | hsa-asg-2615_st2 | 10.45 | 8.47 | 9.40 | 7.55 | 8.26 | 8.60 | 9.34 | 7.15 | 7.93 | 7.73 |
| hsa-asg-12687_st1 | hsa-asg-12687_st1 | 9.45 | 7.52 | 8.13 | 6.15 | 7.58 | 7.91 | 8.06 | 6.36 | 6.73 | 7.01 |
| hsa-asg-1794_st1 | hsa-asg-1794_st1 | 4.16 | 1.83 | 1.94 | 2.63 | 1.69 | 2.16 | 1.03 | 2.14 | 1.46 | 2.89 |
| hsa-asg-466_st1 | hsa-asg-466_st1 | 6.75 | 4.07 | 4.63 | 2.74 | 4.96 | 5.22 | 4.43 | 4.84 | 5.28 | 5.09 |
| hsa-miR-599 | hsa-miR-599_st2 | 5.57 | 3.64 | 3.48 | 3.38 | 4.70 | 3.40 | 3.32 | 4.05 | 1.85 | 2.89 |
| hsa-asg-11962_st1 | hsa-asg-11962_st1 | 8.92 | 6.89 | 7.82 | 5.76 | 6.85 | 7.58 | 7.40 | 5.96 | 6.55 | 6.01 |
| hsa-asg-11993_st1 | hsa-asg-11993_st1 | 9.90 | 8.00 | 8.70 | 6.96 | 7.98 | 8.43 | 8.68 | 7.12 | 7.35 | 6.54 |
| hsa-cand926_st2 | hsa-cand926_st2 | 5.96 | 4.29 | 4.21 | 2.94 | 4.21 | 3.97 | 3.77 | 2.47 | 4.53 | 3.89 |
| hsa-asg-3782_st1 | hsa-asg-3782_st1 | 8.24 | 6.08 | 7.03 | 5.37 | 6.18 | 6.72 | 6.50 | 5.56 | 5.90 | 5.57 |
| hsa-asg-8428_st2 | hsa-asg-8428_st2 | 3.92 | 2.22 | 1.94 | 2.63 | 2.00 | 2.49 | 1.03 | 0.04 | 2.14 | 1.60 |
| hsa-asg-10414_st1 | hsa-asg-10414_st1 | 9.41 | 6.96 | 8.43 | 5.97 | 7.02 | 7.67 | 7.99 | 6.56 | 7.33 | 7.55 |
| hsa-asg-6282_st1 | hsa-asg-6282_st1 | 8.14 | 6.68 | 6.71 | 4.58 | 6.04 | 6.63 | 6.94 | 5.62 | 5.92 | 5.00 |
| hsa-asg-6063_st2 | hsa-asg-6063_st2 | 10.88 | 9.14 | 9.37 | 8.01 | 9.04 | 9.46 | 9.16 | 8.43 | 8.36 | 7.81 |
| hsa-asg-12441_st1 | hsa-asg-12441_st1 | 9.68 | 7.73 | 8.87 | 6.76 | 7.41 | 7.72 | 8.51 | 6.80 | 7.66 | 6.54 |
| hsa-asg-11923_st1 | hsa-asg-11923_st1 | 5.63 | 4.15 | 3.86 | 3.38 | 4.28 | 4.20 | 3.43 | 2.31 | 2.41 | 3.62 |
| hsa-asg-13613_st2 | hsa-asg-13613_st2 | 9.82 | 8.18 | 8.61 | 6.70 | 7.93 | 8.46 | 8.36 | 6.98 | 7.04 | 7.12 |
| hsa-asg-12376_st2 | hsa-asg-12376_st2 | 7.90 | 5.66 | 6.74 | 5.60 | 5.65 | 5.85 | 6.56 | 4.92 | 5.86 | 5.28 |
| hsa-asg-8565_st1 | hsa-asg-8565_st1 | 8.41 | 6.55 | 7.29 | 5.69 | 6.16 | 6.72 | 6.99 | 5.62 | 5.98 | 5.83 |
| hsa-asg-1612_st1 | hsa-asg-1612_st1 | 5.24 | 2.90 | 4.31 | 3.21 | 3.05 | 3.35 | 3.63 | 3.48 | 1.66 | 2.89 |
| hsa-asg-1277_st1 | hsa-asg-1277_st1 | 10.26 | 8.56 | 8.93 | 7.30 | 8.52 | 8.91 | 8.80 | 7.59 | 7.92 | 7.21 |
| hsa-asg-3462_st2 | hsa-asg-3462_st2 | 10.33 | 8.44 | 9.26 | 7.11 | 8.04 | 8.52 | 9.45 | 7.49 | 8.74 | 7.35 |
| hsa-asg-7704_st2 | hsa-asg-7704_st2 | 7.45 | 5.27 | 7.01 | 5.04 | 5.07 | 5.30 | 5.92 | 4.36 | 5.13 | 5.40 |
| hsa-asg-1596_st2 | hsa-asg-1596_st2 | 6.26 | 4.41 | 5.06 | 4.01 | 3.19 | 4.36 | 4.12 | 4.12 | 4.19 | 4.37 |
| hsa-asg-11165_st1 | hsa-asg-11165_st1 | 9.38 | 7.76 | 8.34 | 6.76 | 7.38 | 7.99 | 7.96 | 6.83 | 6.92 | 5.95 |
| hsa-asg-9099_st2 | hsa-asg-9099_st2 | 6.07 | 4.00 | 5.50 | 3.38 | 3.75 | 3.81 | 5.15 | 2.90 | 3.97 | 3.62 |
| hsa-asg-5413_st2 | hsa-asg-5413_st2 | 7.71 | 5.44 | 6.76 | 5.33 | 5.62 | 6.37 | 6.00 | 4.71 | 5.30 | 5.40 |
| hsa-asg-11940_st1 | hsa-asg-11940_st1 | 7.59 | 5.31 | 6.85 | 4.42 | 5.36 | 5.24 | 6.33 | 5.24 | 5.69 | 5.52 |
| hsa-asg-4069_st1 | hsa-asg-4069_st1 | 6.15 | 4.29 | 4.88 | 2.74 | 4.44 | 4.27 | 4.92 | 4.12 | 3.56 | 3.89 |
| hsa-asg-3646_st1 | hsa-asg-3646_st1 | 6.13 | 3.31 | 5.02 | 4.01 | 4.38 | 3.24 | 4.65 | 3.57 | 3.51 | 5.24 |
| hsa-asg-8138_st2 | hsa-asg-8138_st2 | 7.65 | 6.41 | 6.52 | 4.42 | 5.36 | 6.40 | 6.34 | 4.80 | 5.15 | 5.30 |
| hsa-cand899_st2 | hsa-cand899_st2 | 6.07 | 2.75 | 4.74 | 3.30 | 3.98 | 4.17 | 4.77 | 3.38 | 4.22 | 5.09 |
| hsa-asg-7159_st2 | hsa-asg-7159_st2 | 5.37 | 3.53 | 3.24 | 2.40 | 3.94 | 3.89 | 3.43 | 3.98 | 3.40 | 2.29 |
| hsa-miR112_st1 | hsa-miR112_st1 | 9.40 | 7.55 | 8.23 | 6.14 | 7.20 | 7.94 | 8.13 | 6.58 | 7.56 | 7.09 |
| hsa-asg-7654_st2 | hsa-asg-7654_st2 | 8.80 | 6.84 | 7.81 | 5.73 | 6.82 | 7.07 | 7.78 | 6.16 | 6.10 | 6.80 |
| hsa-asg-7954_st1 | hsa-asg-7954_st1 | 9.10 | 7.73 | 8.01 | 6.19 | 7.36 | 7.83 | 7.45 | 6.15 | 6.70 | 6.37 |
| hsa-asg-8329_st1 | hsa-asg-8329_st1 | 7.65 | 6.26 | 6.52 | 4.42 | 5.87 | 6.14 | 6.17 | 5.49 | 5.53 | 4.41 |
| hsa-miR-200a* | hsa-miR-200a-_st2 | 4.72 | 3.05 | 2.83 | 2.15 | 3.89 | 2.57 | 1.76 | 2.14 | 3.17 | 2.89 |
| hsa-asg-807_st2 | hsa-asg-807_st2 | 6.86 | 4.15 | 5.41 | 4.54 | 4.35 | 4.71 | 5.52 | 4.57 | 4.97 | 5.54 |
| hsa-asg-12556_st1 | hsa-asg-12556_st1 | 9.65 | 8.06 | 8.67 | 6.55 | 7.78 | 8.32 | 8.39 | 6.96 | 7.29 | 6.90 |
| hsa-asg-1576_st1 | hsa-asg-1576_st1 | 9.51 | 7.85 | 8.09 | 6.65 | 7.36 | 8.04 | 7.46 | 7.09 | 7.43 | 7.63 |
| hsa-asg-265_st2 | hsa-asg-265_st2 | 7.96 | 6.45 | 7.13 | 5.14 | 5.70 | 5.87 | 7.03 | 5.27 | 5.77 | 5.36 |
| hsa-asg-13471_st1 | hsa-asg-13471_st1 | 6.60 | 4.74 | 4.71 | 4.38 | 5.11 | 5.31 | 5.34 | 4.36 | 4.04 | 3.50 |
| hsa-asg-10055_st1 | hsa-asg-10055_st1 | 3.92 | 2.03 | 0.97 | 2.15 | 1.09 | 1.98 | 2.65 | 1.42 | 2.23 | 2.89 |
| hsa-cand630_st2 | hsa-cand630_st2 | 7.06 | 5.17 | 6.10 | 5.26 | 4.53 | 4.96 | 5.64 | 3.75 | 5.03 | 5.26 |
| hsa-asg-4207_st1 | hsa-asg-4207_st1 | 6.76 | 5.09 | 5.41 | 4.01 | 4.82 | 5.62 | 5.57 | 4.52 | 4.32 | 3.62 |
| hsa-miR-422b | hsa-miR-422b_st2 | 12.69 | 10.62 | 10.51 | 10.71 | 11.3 | 10.68 | 10.3 | 10.9 | 10.7 | 10.5 |
| hsa-asg-4283_st2 | hsa-asg-4283_st2 | 5.17 | 3.91 | 3.48 | 2.63 | 3.80 | 3.89 | 2.80 | 3.48 | 2.23 | 2.51 |
| hsa-cand330_st2 | hsa-cand330_st2 | 6.17 | 4.74 | 4.98 | 3.52 | 4.70 | 5.12 | 4.12 | 2.62 | 3.97 | 3.94 |
| hsa-asg-10478_st2 | hsa-asg-10478_st2 | 5.37 | 3.05 | 4.03 | 3.38 | 2.48 | 4.38 | 4.12 | 3.66 | 2.74 | 2.71 |
| hsa-asg-3740_st1 | hsa-asg-3740_st1 | 7.07 | 4.88 | 6.41 | 4.68 | 5.07 | 5.43 | 5.88 | 3.87 | 4.85 | 4.82 |
| hsa-cand852_st2 | hsa-cand852_st2 | 4.64 | 3.05 | 1.94 | 2.84 | 2.98 | 2.24 | 2.65 | 2.90 | 2.05 | 3.50 |
| hsa-asg-3150_st1 | hsa-asg-3150_st1 | 8.10 | 6.39 | 7.40 | 5.51 | 6.17 | 5.96 | 6.77 | 5.67 | 5.87 | 5.59 |
| hsa-asg-6339_st1 | hsa-asg-6339_st1 | 9.36 | 7.51 | 8.13 | 6.67 | 7.33 | 7.99 | 7.78 | 6.59 | 7.56 | 7.30 |
| hsa-asg-11973_st2 | hsa-asg-11973_st2 | 8.62 | 6.66 | 7.23 | 6.67 | 6.88 | 7.04 | 7.01 | 6.05 | 6.53 | 6.08 |
| hsa-asg-3746_st1 | hsa-asg-3746_st1 | 9.55 | 8.01 | 8.78 | 6.56 | 7.51 | 8.00 | 8.44 | 7.08 | 7.30 | 6.93 |
| hsa-asg-12440_st2 | hsa-asg-12440_st2 | 6.59 | 4.74 | 4.83 | 3.84 | 4.75 | 4.80 | 5.23 | 4.42 | 4.78 | 4.54 |
| hsa-asg-3754_st2 | hsa-asg-3754_st2 | 6.73 | 4.97 | 4.96 | 4.84 | 3.44 | 5.09 | 5.00 | 4.84 | 5.50 | 4.61 |
| hsa-asg-8893_st1 | hsa-asg-8893_st1 | 6.62 | 4.97 | 4.92 | 4.71 | 4.80 | 5.44 | 4.98 | 4.71 | 3.46 | 4.33 |
| hsa-asg-3728_st1 | hsa-asg-3728_st1 | 8.21 | 6.64 | 7.33 | 5.43 | 6.53 | 6.79 | 6.90 | 5.52 | 5.81 | 5.68 |
| hsa-asg-2624_st2 | hsa-asg-2624_st2 | 4.64 | 3.18 | 3.24 | 1.89 | 3.60 | 2.57 | 3.32 | 1.78 | 3.17 | 1.83 |
| hsa-cand805_st2 | hsa-cand805_st2 | 10.05 | 8.23 | 9.20 | 7.34 | 8.24 | 8.82 | 8.70 | 7.66 | 7.87 | 7.21 |
| hsa-asg-10043_st1 | hsa-asg-10043_st1 | 4.50 | 3.18 | 2.50 | 1.89 | 3.12 | 3.29 | 2.14 | 2.90 | 2.05 | 2.29 |
| hsa-asg-3406_st1 | hsa-asg-3406_st1 | 5.34 | 3.73 | 3.05 | 3.13 | 2.98 | 3.81 | 4.08 | 3.91 | 2.32 | 3.99 |
| hsa-asg-7671_st1 | hsa-asg-7671_st1 | 8.15 | 6.24 | 7.39 | 5.76 | 6.13 | 6.82 | 6.90 | 5.60 | 6.17 | 5.30 |
| hsa-asg-1127_st2 | hsa-asg-1127_st2 | 5.43 | 3.64 | 4.03 | 3.52 | 2.98 | 3.64 | 4.19 | 3.75 | 2.41 | 3.73 |
| hsa-asg-7228_st1 | hsa-asg-7228_st1 | 7.10 | 5.79 | 6.36 | 4.25 | 4.59 | 5.39 | 5.95 | 4.71 | 4.35 | 5.59 |
| hsa-asg-4786_st1 | hsa-asg-4786_st1 | 8.72 | 7.17 | 7.73 | 5.66 | 6.78 | 7.35 | 7.48 | 6.56 | 6.77 | 6.19 |
| hsa-asg-7388_st1 | hsa-asg-7388_st1 | 8.13 | 6.51 | 6.92 | 5.47 | 6.19 | 6.95 | 6.91 | 5.90 | 5.83 | 5.80 |
| hsa-asg-7579_st2 | hsa-asg-7579_st2 | 7.45 | 5.95 | 6.66 | 5.04 | 5.70 | 6.45 | 5.98 | 4.71 | 5.20 | 4.64 |
| hsa-miR-517c | hsa-miR-517c_st2 | 4.54 | 2.90 | 2.50 | 3.04 | 3.60 | 3.06 | 3.43 | 1.42 | 2.23 | 2.07 |
| hsa-asg-12760_st2 | hsa-asg-12760_st2 | 5.58 | 3.83 | 4.50 | 4.01 | 3.12 | 3.35 | 3.97 | 4.05 | 2.58 | 4.21 |
| hsa-asg-4872_st1 | hsa-asg-4872_st1 | 5.39 | 3.31 | 4.50 | 3.04 | 3.85 | 2.65 | 4.22 | 2.62 | 3.88 | 3.94 |
| hsa-asg-9273_st2 | hsa-asg-9273_st2 | 11.12 | 9.53 | 10.06 | 8.40 | 9.37 | 10.18 | 9.97 | 8.78 | 9.20 | 8.10 |
| hsa-asg-9511_st2 | hsa-asg-9511_st2 | 8.51 | 6.96 | 7.27 | 6.18 | 6.81 | 7.12 | 7.02 | 5.88 | 6.36 | 6.48 |
| hsa-cand441_st2 | hsa-cand441_st2 | 9.14 | 7.72 | 8.02 | 5.93 | 7.30 | 7.92 | 7.90 | 6.86 | 7.44 | 6.70 |
| hsa-asg-9270_st1 | hsa-asg-9270_st1 | 4.62 | 2.41 | 3.58 | 2.15 | 3.44 | 2.65 | 3.68 | 1.42 | 2.74 | 3.06 |
| hsa-asg-8193_st2 | hsa-asg-8193_st2 | 6.56 | 5.34 | 5.87 | 4.34 | 4.82 | 4.44 | 5.21 | 3.91 | 4.63 | 3.99 |
| hsa-asg-9412_st2 | hsa-asg-9412_st2 | 8.78 | 7.03 | 7.88 | 5.85 | 6.63 | 7.71 | 7.75 | 6.79 | 6.24 | 6.71 |
| hsa-asg-12735_st1 | hsa-asg-12735_st1 | 8.26 | 6.81 | 6.64 | 5.85 | 6.49 | 7.38 | 7.02 | 6.36 | 6.06 | 5.30 |
| hsa-asg-5241_st1 | hsa-asg-5241_st1 | 4.98 | 3.64 | 3.58 | 2.63 | 3.25 | 3.18 | 2.49 | 3.57 | 2.41 | 3.73 |
| hsa-asg-6958_st2 | hsa-asg-6958_st2 | 6.08 | 4.97 | 4.52 | 3.84 | 3.55 | 4.33 | 4.74 | 3.57 | 4.91 | 3.99 |
| hsa-asg-1922_st2 | hsa-asg-1922_st2 | 7.38 | 5.76 | 6.06 | 5.39 | 5.86 | 5.60 | 5.99 | 4.88 | 5.66 | 4.95 |
| hsa-asg-5149_st2 | hsa-asg-5149_st2 | 6.66 | 5.31 | 4.92 | 4.71 | 4.82 | 5.40 | 5.21 | 3.66 | 4.78 | 4.90 |
| hsa-asg-5385_st2 | hsa-asg-5385_st2 | 7.59 | 5.79 | 6.49 | 5.59 | 5.50 | 5.73 | 6.35 | 5.20 | 5.66 | 5.86 |
| hsa-asg-4847_st1 | hsa-asg-4847_st1 | 8.59 | 6.87 | 7.71 | 5.94 | 6.47 | 7.10 | 7.37 | 5.82 | 6.80 | 7.10 |
| hsa-cand6_st2 | hsa-cand6_st2 | 8.70 | 7.03 | 7.79 | 6.10 | 6.90 | 7.17 | 7.36 | 6.27 | 6.43 | 7.12 |
| hsa-asg-809_st2 | hsa-asg-809_st2 | 7.41 | 6.22 | 6.22 | 5.14 | 6.23 | 6.11 | 6.10 | 4.62 | 5.62 | 4.51 |
| hsa-asg-748_st1 | hsa-asg-748_st1 | 6.45 | 5.01 | 5.97 | 3.90 | 3.94 | 5.11 | 5.00 | 4.18 | 4.55 | 4.44 |
| hsa-asg-1187_st2 | hsa-asg-1187_st2 | 7.41 | 5.61 | 6.40 | 4.84 | 5.66 | 6.61 | 6.18 | 4.88 | 5.44 | 5.22 |
| hsa-asg-9248_st2 | hsa-asg-9248_st2 | 9.91 | 8.57 | 8.95 | 7.30 | 8.04 | 8.83 | 8.94 | 7.43 | 8.10 | 7.13 |
| hsa-asg-4759_st1 | hsa-asg-4759_st1 | 8.57 | 7.03 | 7.97 | 5.85 | 6.74 | 7.35 | 7.54 | 5.92 | 6.42 | 6.54 |
| hsa-asg-5289_st2 | hsa-asg-5289_st2 | 7.80 | 6.05 | 7.00 | 5.39 | 5.67 | 6.17 | 6.84 | 5.14 | 6.79 | 5.38 |
| hsa-asg-6129_st2 | hsa-asg-6129_st2 | 8.64 | 6.85 | 7.52 | 6.94 | 7.11 | 7.08 | 7.60 | 6.69 | 5.78 | 6.43 |
| hsa-asg-13997_st2 | hsa-asg-13997_st2 | 4.26 | 3.05 | 3.24 | 2.15 | 2.98 | 2.16 | 2.32 | 1.25 | 3.17 | 2.29 |
| hsa-asg-8552_st2 | hsa-asg-8552_st2 | 12.26 | 10.96 | 11.28 | 9.81 | 10.5 | 11.21 | 11.0 | 9.76 | 10.1 | 9.89 |
| hsa-asg-3030_st2 | hsa-asg-3030_st2 | 5.45 | 3.05 | 4.44 | 3.21 | 3.89 | 4.47 | 3.32 | 3.48 | 3.61 | 3.94 |
| hsa-asg-7278_st1 | hsa-asg-7278_st1 | 6.75 | 5.20 | 5.73 | 4.34 | 4.92 | 5.28 | 5.54 | 3.98 | 4.73 | 5.42 |
| hsa-asg-9165_st1 | hsa-asg-9165_st1 | 8.36 | 6.05 | 7.45 | 5.53 | 6.41 | 7.48 | 7.32 | 6.21 | 6.83 | 6.35 |
| hsa-asg-6149_st2 | hsa-asg-6149_st2 | 8.70 | 7.32 | 7.46 | 6.24 | 6.93 | 7.73 | 7.28 | 6.28 | 7.62 | 5.87 |
| hsa-asg-2637_st1 | hsa-asg-2637_st1 | 5.86 | 4.35 | 4.14 | 4.96 | 4.53 | 4.24 | 3.38 | 3.38 | 3.84 | 4.33 |
| hsa-asg-4814_st1 | hsa-asg-4814_st1 | 7.96 | 6.51 | 7.06 | 5.35 | 6.03 | 6.30 | 6.85 | 5.41 | 6.42 | 6.22 |
| hsa-asg-9287_st2 | hsa-asg-9287_st2 | 7.34 | 5.66 | 6.18 | 4.71 | 5.39 | 6.63 | 5.97 | 4.67 | 5.83 | 5.52 |
| hsa-asg-14051_st2 | hsa-asg-14051_st2 | 8.29 | 6.09 | 7.27 | 5.94 | 5.91 | 6.88 | 7.07 | 6.09 | 6.95 | 6.96 |
| hsa-asg-12515_st2 | hsa-asg-12515_st2 | 5.69 | 4.00 | 4.25 | 3.04 | 4.10 | 4.57 | 4.32 | 3.66 | 4.12 | 3.73 |
| hsa-asg-1293_st2 | hsa-asg-1293_st2 | 7.75 | 6.39 | 6.83 | 5.59 | 6.19 | 6.21 | 6.58 | 5.49 | 5.76 | 5.34 |
| hsa-asg-7471_st1 | hsa-asg-7471_st1 | 7.36 | 5.58 | 5.67 | 5.68 | 6.74 | 5.67 | 5.25 | 5.24 | 4.97 | 6.07 |
| hsa-asg-8675_st1 | hsa-asg-8675_st1 | 7.40 | 5.69 | 6.76 | 5.66 | 5.53 | 5.51 | 6.20 | 4.71 | 5.50 | 5.65 |
| hsa-asg-13999_st1 | hsa-asg-13999_st1 | 9.05 | 8.18 | 8.00 | 7.27 | 7.18 | 7.59 | 7.75 | 6.52 | 7.19 | 6.44 |
| hsa-asg-10772_st1 | hsa-asg-10772_st1 | 7.90 | 6.44 | 6.77 | 6.14 | 6.74 | 5.54 | 6.64 | 5.58 | 6.00 | 5.97 |
| hsa-asg-12395_st2 | hsa-asg-12395_st2 | 7.33 | 4.93 | 5.80 | 4.78 | 5.96 | 6.82 | 6.08 | 5.20 | 5.41 | 5.77 |
| hsa-asg-4703_st2 | hsa-asg-4703_st2 | 6.93 | 5.34 | 6.13 | 4.61 | 4.87 | 5.70 | 5.84 | 4.76 | 5.23 | 4.70 |
| hsa-asg-9507_st1 | hsa-asg-9507_st1 | 10.82 | 9.41 | 9.98 | 8.35 | 9.28 | 9.81 | 9.72 | 8.49 | 8.96 | 8.23 |
| hsa-asg-7336_st1 | hsa-asg-7336_st1 | 7.24 | 5.27 | 6.28 | 5.39 | 5.53 | 6.00 | 6.39 | 4.84 | 5.58 | 4.67 |
| hsa-asg-9262_st1 | hsa-asg-9262_st1 | 6.14 | 4.59 | 4.28 | 3.96 | 5.74 | 4.71 | 4.52 | 3.75 | 4.08 | 4.48 |
| hsa-asg-12298_st1 | hsa-asg-12298_st1 | 5.69 | 4.64 | 5.08 | 4.06 | 3.89 | 3.81 | 4.15 | 3.27 | 3.35 | 3.89 |
| hsa-asg-5176_st2 | hsa-asg-5176_st2 | 4.13 | 2.22 | 3.24 | 2.15 | 1.69 | 2.72 | 3.08 | 1.78 | 2.58 | 2.71 |
| hsa-asg-11714_st2 | hsa-asg-11714_st2 | 9.91 | 8.92 | 9.15 | 7.34 | 8.04 | 8.35 | 9.06 | 7.49 | 8.22 | 7.70 |
| hsa-asg-3345_st1 | hsa-asg-3345_st1 | 9.45 | 8.09 | 8.28 | 6.99 | 7.48 | 8.27 | 7.87 | 6.91 | 8.09 | 8.28 |
| hsa-asg-12625_st1 | hsa-asg-12625_st1 | 5.44 | 4.22 | 5.33 | 3.59 | 3.44 | 3.18 | 4.05 | 3.57 | 3.46 | 3.29 |
| hsa-asg-12014_st2 | hsa-asg-12014_st2 | 9.89 | 8.54 | 8.87 | 7.55 | 8.09 | 8.75 | 8.91 | 7.61 | 8.28 | 7.77 |
| hsa-asg-124_st1 | hsa-asg-124_st1 | 6.65 | 4.88 | 5.28 | 4.30 | 4.56 | 5.70 | 5.34 | 5.27 | 4.75 | 5.11 |
| hsa-asg-4840_st1 | hsa-asg-4840_st1 | 6.42 | 5.44 | 5.02 | 3.52 | 5.28 | 5.40 | 4.98 | 4.62 | 4.55 | 4.37 |
| hsa-asg-10971_st2 | hsa-asg-10971_st2 | 7.63 | 6.22 | 6.90 | 5.39 | 5.96 | 6.17 | 5.98 | 5.98 | 6.43 | 5.04 |
| hsa-asg-9879_st1 | hsa-asg-9879_st1 | 4.81 | 2.22 | 4.25 | 2.63 | 3.32 | 3.93 | 3.14 | 2.77 | 3.40 | 3.06 |
| hsa-asg-11795_st2 | hsa-asg-11795_st2 | 7.05 | 5.09 | 6.45 | 5.45 | 4.92 | 5.99 | 5.72 | 4.76 | 5.75 | 4.82 |
| hsa-asg-3952_st1 | hsa-asg-3952_st1 | 10.23 | 8.66 | 9.42 | 7.48 | 8.39 | 8.75 | 9.22 | 7.90 | 8.70 | 9.03 |
| hsa-miR-576 | hsa-miR-576_st2 | 3.92 | 2.22 | 2.83 | 3.04 | 1.69 | 1.98 | 1.95 | 1.96 | 2.05 | 3.06 |
| hsa-asg-14025_st1 | hsa-asg-14025_st1 | 7.65 | 6.37 | 6.65 | 5.26 | 6.02 | 6.73 | 6.29 | 5.33 | 6.06 | 5.62 |
| hsa-asg-13135_st1 | hsa-asg-13135_st1 | 6.72 | 5.61 | 5.61 | 5.24 | 4.89 | 4.76 | 4.70 | 5.14 | 4.44 | 5.57 |
| hsa-asg-8872_st1 | hsa-asg-8872_st1 | 8.77 | 7.85 | 7.97 | 6.91 | 6.99 | 7.39 | 7.83 | 6.21 | 7.06 | 6.34 |
| hsa-asg-11391_st1 | hsa-asg-11391_st1 | 3.72 | 1.43 | 1.54 | 2.40 | 2.00 | 3.40 | 1.86 | 2.62 | 2.23 | 1.60 |
| hsa-asg-8163_st1 | hsa-asg-8163_st1 | 10.45 | 8.54 | 9.72 | 8.47 | 8.38 | 8.99 | 9.58 | 8.08 | 9.61 | 8.26 |
| hsa-asg-12777_st2 | hsa-asg-12777_st2 | 7.51 | 5.86 | 6.42 | 4.93 | 5.47 | 5.83 | 6.45 | 6.12 | 6.01 | 6.14 |
| hsa-asg-10589_st1 | hsa-asg-10589_st1 | 3.72 | 1.05 | 1.64 | 3.04 | 2.66 | 2.49 | 1.76 | 2.39 | 1.85 | 2.29 |
| hsa-asg-1893_st2 | hsa-asg-1893_st2 | 9.19 | 7.54 | 8.49 | 6.67 | 7.48 | 8.09 | 8.41 | 6.84 | 7.38 | 7.61 |
| hsa-asg-8173_st1 | hsa-asg-8173_st1 | 8.38 | 6.79 | 7.31 | 5.41 | 6.89 | 7.56 | 7.27 | 6.36 | 6.65 | 6.97 |
| hsa-asg-5265_st1 | hsa-asg-5265_st1 | 8.11 | 6.74 | 7.06 | 5.82 | 6.30 | 7.25 | 6.97 | 6.30 | 6.40 | 5.96 |
| hsa-asg-6961_st2 | hsa-asg-6961_st2 | 6.76 | 5.84 | 6.10 | 5.31 | 5.11 | 4.66 | 4.67 | 4.71 | 4.78 | 5.56 |
| hsa-asg-12150_st1 | hsa-asg-12150_st1 | 9.39 | 7.95 | 8.76 | 7.20 | 7.43 | 8.09 | 8.33 | 6.75 | 7.97 | 7.97 |
| hsa-asg-6618_st2 | hsa-asg-6618_st2 | 6.93 | 5.47 | 5.94 | 4.50 | 5.31 | 5.71 | 6.06 | 4.92 | 5.18 | 5.22 |
| hsa-asg-14230_st1 | hsa-asg-14230_st1 | 5.37 | 4.29 | 3.68 | 4.38 | 4.56 | 3.29 | 3.43 | 2.77 | 3.93 | 4.04 |
| hsa-asg-938_st2 | hsa-asg-938_st2 | 8.05 | 7.10 | 7.14 | 6.68 | 5.44 | 6.62 | 6.87 | 5.64 | 6.70 | 6.38 |
| hsa-asg-9515_st1 | hsa-asg-9515_st1 | 7.04 | 5.05 | 5.88 | 5.09 | 5.36 | 5.72 | 6.20 | 5.10 | 5.40 | 5.79 |
| hsa-asg-9500_st1 | hsa-asg-9500_st1 | 5.44 | 4.59 | 4.58 | 3.59 | 3.80 | 3.55 | 4.08 | 3.15 | 4.15 | 3.68 |
| hsa-miR223_st2 | hsa-miR223_st2 | 6.90 | 5.50 | 6.08 | 4.96 | 4.70 | 5.14 | 6.01 | 5.67 | 5.28 | 5.09 |
| hsa-miR-498 | hsa-miR-498_st1 | 7.01 | 5.71 | 6.31 | 5.24 | 4.87 | 5.87 | 6.13 | 4.76 | 5.40 | 5.11 |
| hsa-asg-14217_st1 | hsa-asg-14217_st1 | 6.87 | 5.13 | 5.87 | 5.39 | 4.59 | 4.96 | 5.69 | 4.52 | 5.74 | 6.34 |
| hsa-asg-1227_st1 | hsa-asg-1227_st1 | 5.87 | 5.09 | 4.85 | 3.52 | 4.17 | 5.03 | 4.70 | 4.12 | 4.38 | 3.50 |
| hsa-asg-8490_st1 | hsa-asg-8490_st1 | 7.51 | 6.24 | 6.44 | 5.85 | 5.81 | 6.08 | 5.93 | 5.30 | 6.27 | 6.28 |
| hsa-asg-8639_st2 | hsa-asg-8639_st2 | 10.40 | 8.90 | 9.82 | 8.08 | 8.69 | 9.38 | 9.14 | 8.32 | 9.06 | 8.84 |
| hsa-asg-6500_st1 | hsa-asg-6500_st1 | 6.25 | 4.74 | 4.81 | 4.68 | 4.02 | 5.11 | 5.31 | 3.66 | 5.09 | 5.47 |
| hsa-asg-1715_st2 | hsa-asg-1715_st2 | 4.72 | 3.53 | 3.78 | 3.21 | 2.30 | 2.57 | 3.20 | 4.18 | 3.40 | 3.06 |
| hsa-asg-9334_st2 | hsa-asg-9334_st2 | 8.18 | 6.32 | 7.60 | 6.15 | 6.41 | 6.92 | 7.31 | 6.22 | 6.60 | 6.85 |
| hsa-asg-8896_st2 | hsa-asg-8896_st2 | 6.24 | 3.73 | 5.27 | 4.16 | 5.11 | 4.84 | 4.52 | 5.36 | 4.95 | 5.09 |
| hsa-asg-10175_st2 | hsa-asg-10175_st2 | 3.64 | 2.41 | 2.50 | 1.89 | 2.00 | 1.80 | 2.87 | 2.31 | 1.46 | 2.51 |
| hsa-miR-503 | hsa-miR-503_st1 | 8.06 | 6.88 | 7.17 | 7.38 | 6.60 | 6.08 | 6.45 | 6.39 | 6.60 | 5.99 |
| hsa-asg-13197_st1 | hsa-asg-13197_st1 | 4.31 | 2.41 | 2.67 | 3.38 | 3.25 | 2.16 | 2.94 | 2.47 | 3.03 | 3.50 |
| hsa-asg-1168_st1 | hsa-asg-1168_st1 | 7.45 | 6.15 | 6.80 | 5.26 | 5.78 | 6.54 | 6.64 | 5.57 | 5.55 | 5.74 |
| hsa-asg-5047_st1 | hsa-asg-5047_st1 | 6.06 | 4.47 | 5.47 | 4.11 | 4.28 | 5.21 | 4.88 | 3.57 | 4.80 | 4.76 |
| hsa-asg-773_st1 | hsa-asg-773_st1 | 8.32 | 7.21 | 7.41 | 6.30 | 6.35 | 7.33 | 6.73 | 6.33 | 7.34 | 6.93 |
| hsa-miR-379 | hsa-miR-379_st1 | 8.01 | 6.51 | 6.37 | 7.12 | 6.96 | 7.01 | 6.54 | 6.33 | 6.13 | 6.20 |
| hsa-asg-2041_st1 | hsa-asg-2041_st1 | 7.02 | 5.93 | 6.09 | 5.37 | 5.59 | 5.87 | 5.70 | 5.10 | 5.75 | 4.87 |
| hsa-asg-9253_st2 | hsa-asg-9253_st2 | 3.89 | 3.31 | 2.67 | 1.89 | 2.30 | 3.12 | 2.32 | 2.62 | 1.85 | 2.07 |
| hsa-asg-8636_st2 | hsa-asg-8636_st2 | 7.56 | 5.84 | 6.86 | 5.43 | 5.53 | 6.21 | 6.65 | 5.64 | 6.60 | 6.45 |
| hsa-asg-1903_st2 | hsa-asg-1903_st2 | 10.28 | 9.18 | 9.22 | 8.31 | 9.24 | 9.53 | 9.31 | 8.54 | 8.49 | 8.09 |
| hsa-asg-13334_st2 | hsa-asg-13334_st2 | 4.38 | 3.05 | 3.36 | 2.15 | 3.25 | 3.45 | 2.80 | 3.27 | 2.89 | 2.71 |
| hsa-miR165_st1 | hsa-miR165_st1 | 6.60 | 5.66 | 5.71 | 5.31 | 5.17 | 5.40 | 5.43 | 4.71 | 4.82 | 4.73 |
| hsa-asg-2862_st1 | hsa-asg-2862_st1 | 8.19 | 6.32 | 7.27 | 7.50 | 6.84 | 6.71 | 6.93 | 6.57 | 6.67 | 6.53 |
| hsa-asg-9050_st1 | hsa-asg-9050_st1 | 8.86 | 8.13 | 8.10 | 6.94 | 7.53 | 7.52 | 7.64 | 6.69 | 7.55 | 7.29 |
| hsa-asg-8946_st1 | hsa-asg-8946_st1 | 5.82 | 4.22 | 4.98 | 4.01 | 3.85 | 4.71 | 5.21 | 3.57 | 4.61 | 4.87 |
| hsa-asg-9209_st2 | hsa-asg-9209_st2 | 7.75 | 6.13 | 6.97 | 5.97 | 6.34 | 6.48 | 6.84 | 5.74 | 6.55 | 6.38 |
| hsa-asg-956_st2 | hsa-asg-956_st2 | 4.31 | 3.53 | 3.58 | 2.84 | 2.48 | 2.33 | 3.32 | 2.47 | 2.58 | 3.36 |
| hsa-asg-8188_st1 | hsa-asg-8188_st1 | 8.38 | 7.37 | 8.04 | 6.15 | 6.88 | 7.25 | 7.06 | 6.32 | 7.08 | 6.98 |
| hsa-asg-2849_st2 | hsa-asg-2849_st2 | 4.74 | 3.31 | 4.11 | 2.40 | 2.82 | 3.50 | 4.12 | 3.27 | 3.40 | 3.50 |
| hsa-asg-13350_st2 | hsa-asg-13350_st2 | 9.92 | 9.28 | 9.03 | 8.32 | 8.83 | 8.59 | 8.82 | 8.28 | 8.26 | 8.05 |
| hsa-asg-9687_st1 | hsa-asg-9687_st1 | 5.46 | 4.74 | 4.76 | 3.90 | 4.65 | 3.85 | 4.19 | 4.05 | 3.71 | 3.50 |
| hsa-asg-6924_st1 | hsa-asg-6924_st1 | 7.85 | 6.53 | 7.33 | 6.10 | 7.10 | 6.12 | 6.92 | 6.35 | 5.96 | 6.54 |
| hsa-miR-491 | hsa-miR-491_st1 | 6.77 | 5.24 | 6.12 | 5.04 | 5.61 | 5.51 | 5.70 | 5.12 | 5.48 | 5.44 |
| hsa-asg-6890_st1 | hsa-asg-6890_st1 | 5.57 | 4.41 | 4.47 | 4.01 | 4.59 | 3.85 | 4.32 | 4.15 | 4.25 | 4.44 |
| hsa-asg-10291_st2 | hsa-asg-10291_st2 | 5.16 | 4.15 | 4.52 | 4.06 | 4.02 | 3.59 | 2.94 | 3.83 | 3.46 | 4.25 |
| hsa-cand960_st2 | hsa-cand960_st2 | 6.15 | 4.97 | 5.80 | 4.25 | 4.67 | 5.28 | 5.04 | 4.76 | 4.63 | 4.41 |
| hsa-asg-961_st1 | hsa-asg-961_st1 | 5.19 | 3.73 | 4.50 | 3.21 | 3.75 | 3.68 | 4.85 | 3.91 | 3.97 | 3.50 |
| hsa-asg-3126_st1 | hsa-asg-3126_st1 | 5.13 | 3.31 | 4.44 | 4.30 | 3.05 | 3.85 | 4.08 | 3.48 | 3.97 | 4.21 |
| hsa-asg-8039_st2 | hsa-asg-8039_st2 | 4.85 | 3.31 | 4.28 | 3.13 | 3.44 | 2.79 | 3.43 | 3.98 | 4.08 | 3.79 |
| hsa-asg-11481_st2 | hsa-asg-11481_st2 | 4.95 | 3.18 | 4.03 | 3.21 | 3.75 | 3.18 | 4.01 | 3.91 | 4.04 | 3.84 |
| hsa-asg-10065_st1 | hsa-asg-10065_st1 | 5.37 | 4.47 | 4.31 | 3.66 | 4.70 | 4.44 | 3.63 | 4.05 | 3.80 | 3.94 |
| hsa-asg-1319_st2 | hsa-asg-1319_st2 | 6.98 | 5.50 | 6.23 | 5.26 | 5.74 | 6.43 | 6.09 | 5.38 | 5.87 | 5.09 |
| hsa-asg-7170_st2 | hsa-asg-7170_st2 | 5.16 | 4.22 | 3.78 | 3.21 | 4.10 | 3.81 | 4.70 | 3.48 | 4.44 | 3.50 |
| hsa-asg-1689_st2 | hsa-asg-1689_st2 | 6.65 | 5.58 | 5.96 | 5.21 | 5.13 | 5.54 | 5.43 | 4.76 | 5.32 | 5.77 |
| hsa-asg-9491_st1 | hsa-asg-9491_st1 | 5.79 | 4.53 | 4.96 | 3.72 | 4.82 | 4.69 | 4.96 | 4.12 | 4.95 | 4.17 |
| hsa-asg-381_st1 | hsa-asg-381_st1 | 4.54 | 3.05 | 3.58 | 3.04 | 3.66 | 3.81 | 3.32 | 3.48 | 3.29 | 2.51 |
| hsa-asg-8253_st2 | hsa-asg-8253_st2 | 10.93 | 9.67 | 10.27 | 8.79 | 9.49 | 10.36 | 10.0 | 9.21 | 9.70 | 9.78 |
| hsa-cand753_st1 | hsa-cand753_st1 | 6.59 | 5.55 | 5.86 | 4.93 | 5.18 | 5.39 | 5.79 | 4.62 | 5.33 | 5.61 |
| hsa-asg-2542_st1 | hsa-asg-2542_st1 | 6.08 | 4.69 | 4.83 | 3.72 | 4.62 | 5.16 | 5.21 | 4.96 | 5.28 | 5.30 |
| hsa-asg-125_st1 | hsa-asg-125_st1 | 9.30 | 8.40 | 8.45 | 7.21 | 7.84 | 8.63 | 8.33 | 7.89 | 8.06 | 7.94 |
| hsa-asg-3722_st1 | hsa-asg-3722_st1 | 10.11 | 9.12 | 9.51 | 9.24 | 8.61 | 8.85 | 8.99 | 8.29 | 9.00 | 8.68 |
| hsa-asg-4208_st1 | hsa-asg-4208_st1 | 4.85 | 3.42 | 3.95 | 3.90 | 3.89 | 3.06 | 3.63 | 3.48 | 4.25 | 3.36 |
| hsa-asg-9411_st1 | hsa-asg-9411_st1 | 6.28 | 5.66 | 4.61 | 5.33 | 5.36 | 5.05 | 4.83 | 5.03 | 4.71 | 5.24 |
| hsa-asg-11900_st1 | hsa-asg-11900_st1 | 6.87 | 5.34 | 6.05 | 5.37 | 5.50 | 6.18 | 5.07 | 6.12 | 6.22 | 5.36 |
| hsa-asg-3224_st1 | hsa-asg-3224_st1 | 5.34 | 4.79 | 3.78 | 4.46 | 4.48 | 4.38 | 4.32 | 3.48 | 3.61 | 4.29 |
| hsa-cand659_st1 | hsa-cand659_st1 | 8.94 | 7.82 | 7.93 | 7.34 | 7.90 | 8.06 | 8.08 | 7.49 | 7.61 | 7.81 |
| hsa-asg-12874_st1 | hsa-asg-12874_st1 | 5.56 | 4.00 | 4.18 | 4.01 | 4.85 | 4.57 | 4.83 | 4.18 | 4.50 | 4.64 |
| hsa-asg-12216_st1 | hsa-asg-12216_st1 | 4.81 | 3.73 | 4.03 | 3.52 | 3.60 | 4.14 | 3.72 | 3.27 | 3.71 | 3.50 |
| hsa-asg-917_st2 | hsa-asg-917_st2 | 6.24 | 5.69 | 5.25 | 4.61 | 4.89 | 5.89 | 4.79 | 5.00 | 4.85 | 5.20 |
| hsa-asg-6845_st2 | hsa-asg-6845_st2 | 3.79 | 2.58 | 3.05 | 2.40 | 3.12 | 2.65 | 2.80 | 2.22 | 2.41 | 3.06 |
| hsa-asg-1896_st2 | hsa-asg-1896_st2 | 4.21 | 3.42 | 3.36 | 2.40 | 3.19 | 3.50 | 3.63 | 2.90 | 2.50 | 3.22 |
| hsa-cand764_st1 | hsa-cand764_st1 | 6.92 | 5.86 | 6.04 | 5.55 | 5.73 | 6.35 | 6.04 | 5.03 | 6.36 | 5.62 |
| hsa-asg-4118_st1 | hsa-asg-4118_st1 | 7.84 | 6.66 | 7.09 | 7.12 | 7.22 | 6.70 | 7.13 | 6.50 | 6.41 | 6.18 |
| hsa-asg-4836_st2 | hsa-asg-4836_st2 | 6.62 | 5.58 | 6.19 | 5.41 | 5.29 | 5.65 | 5.84 | 5.07 | 5.65 | 5.54 |
| hsa-miR203_st1 | hsa-miR203_st1 | 7.11 | 6.05 | 6.89 | 5.91 | 5.49 | 5.97 | 6.40 | 5.74 | 6.17 | 6.28 |
| hsa-miR-496 | hsa-miR-496_st1 | 3.12 | 2.41 | 2.67 | 1.89 | 2.30 | 1.62 | 2.49 | 2.14 | 1.66 | 1.83 |

| | LNneg | | | | | |
|---|---|---|---|---|---|---|
| Micro RNA | M | SD | % | ttest | log2Diff | Fold |
| hsa-miR-206 | 5.32 | 2.31 | 44 | 8.20E−03 | −8.51 | 364.0 |
| hsa-miR-133b | 6.53 | 1.79 | 67 | 9.54E−03 | −6.39 | 83.8 |
| hsa-miR-499 | 4.87 | 0.85 | 22 | 1.12E−04 | −6.30 | 78.6 |
| hsa-miR-499 | 4.86 | 0.74 | 22 | 4.95E−05 | −6.13 | 70.0 |
| hsa-miR-133a | 7.59 | 1.47 | 89 | 5.83E−03 | −5.76 | 54.2 |
| hsa-asg-4915_st1 | 2.96 | 0.81 | 0 | 3.07E−04 | −5.16 | 35.8 |
| hsa-miR-429 | 2.86 | 1.14 | 0 | 2.71E−03 | −5.13 | 35.0 |
| hsa-miR-200b | 7.68 | 1.27 | 100 | 6.53E−03 | −4.88 | 29.4 |
| hsa-asg-2027_st1 | 3.94 | 1.01 | 0 | 2.01E−03 | −4.79 | 27.6 |
| hsa-miR-200a | 5.54 | 1.15 | 67 | 6.27E−03 | −4.45 | 21.8 |
| hsa-miR-200c | 9.05 | 1.21 | 100 | 1.11E−02 | −4.20 | 18.4 |
| hsa-asg-2399_st2 | 2.52 | 0.67 | 0 | 4.73E−04 | −3.99 | 15.9 |
| hsa-miR-605 | 2.52 | 1.03 | 0 | 6.65E−03 | −3.95 | 15.5 |
| hsa-asg-14153_st2 | 2.73 | 0.85 | 0 | 2.49E−03 | −3.89 | 14.9 |
| hsa-asg-11715_st2 | 1.90 | 0.74 | 0 | 1.32E−03 | −3.76 | 13.6 |
| hsa-asg-2484_st2 | 2.57 | 0.74 | 0 | 1.51E−03 | −3.70 | 13.0 |
| hsa-asg-3983_st1 | 5.77 | 0.80 | 0 | 2.36E−03 | −3.70 | 13.0 |
| hsa-asg-6283_st1 | 4.19 | 1.50 | 11 | 4.76E−02 | −3.69 | 12.9 |
| hsa-miR-368 | 6.25 | 1.40 | 67 | 3.87E−02 | −3.65 | 12.6 |
| hsa-asg-4209_st2 | 4.22 | 0.88 | 0 | 4.42E−03 | −3.64 | 12.5 |
| hsa-miR-381 | 3.08 | 0.91 | 0 | 5.40E−03 | −3.64 | 12.5 |
| hsa-miR-203 | 6.77 | 1.38 | 78 | 3.78E−02 | −3.63 | 12.4 |
| hsa-asg-10309_st1 | 4.22 | 1.45 | 33 | 4.63E−02 | −3.59 | 12.0 |
| hsa-asg-2345_st2 | 2.35 | 0.76 | 0 | 2.08E−03 | −3.59 | 12.0 |
| hsa-asg-10393_st1 | 2.66 | 0.74 | 0 | 1.80E−03 | −3.59 | 12.0 |
| hsa-cand14_st1 | 2.20 | 0.65 | 0 | 8.78E−04 | −3.55 | 11.7 |
| hsa-asg-1375_st1 | 6.11 | 0.95 | 56 | 7.84E−03 | −3.51 | 11.4 |
| hsa-asg-12172_st2 | 6.54 | 1.16 | 67 | 2.11E−02 | −3.50 | 11.3 |
| hsa-asg-6178_st2 | 2.29 | 0.93 | 0 | 7.89E−03 | −3.46 | 11.0 |
| hsa-miR-539 | 2.19 | 0.63 | 0 | 8.76E−04 | −3.42 | 10.7 |
| hsa-miR-539 | 2.52 | 0.63 | 0 | 1.37E−03 | −3.19 | 9.2 |
| hsa-asg-3473_st1 | 5.85 | 1.16 | 0 | 2.35E−02 | −3.42 | 10.7 |
| hsa-asg-6623_st2 | 5.99 | 0.93 | 56 | 8.40E−03 | −3.39 | 10.5 |
| hsa-asg-3081_st1 | 3.99 | 1.21 | 11 | 2.92E−02 | −3.38 | 10.4 |
| hsa-miR-141 | 4.16 | 0.69 | 0 | 1.86E−03 | −3.33 | 10.0 |
| hsa-asg-12142_st1 | 2.29 | 0.70 | 0 | 1.93E−03 | −3.32 | 10.0 |
| hsa-asg-1020_st2 | 5.92 | 1.24 | 67 | 3.53E−02 | −3.29 | 9.8 |
| hsa-asg-3743_st1 | 3.19 | 0.68 | 0 | 2.01E−03 | −3.24 | 9.4 |
| hsa-asg-1826_st2 | 2.72 | 0.59 | 0 | 8.28E−04 | −3.22 | 9.3 |
| hsa-asg-4116_st2 | 6.02 | 1.00 | 56 | 1.53E−02 | −3.22 | 9.3 |
| hsa-asg-924_st1 | 3.38 | 0.89 | 0 | 9.53E−03 | −3.20 | 9.2 |
| hsa-asg-555_st1 | 6.60 | 0.89 | 78 | 9.30E−03 | −3.19 | 9.1 |
| hsa-asg-9920_st1 | 7.32 | 0.85 | 44 | 7.94E−03 | −3.14 | 8.8 |
| hsa-asg-20_st1 | 2.76 | 1.20 | 0 | 3.85E−02 | −3.13 | 8.8 |
| hsa-asg-1296_st1 | 3.24 | 0.85 | 0 | 8.28E−03 | −3.13 | 8.7 |
| hsa-asg-10250_st1 | 2.04 | 0.74 | 0 | 4.11E−03 | −3.11 | 8.7 |
| hsa-asg-4037_st1 | 2.51 | 0.58 | 0 | 9.45E−04 | −3.11 | 8.7 |
| hsa-asg-8242_st2 | 3.11 | 1.16 | 0 | 3.41E−02 | −3.11 | 8.6 |
| hsa-asg-1699_st2 | 7.25 | 1.16 | 56 | 3.46E−02 | −3.10 | 8.6 |
| hsa-asg-7637_st2 | 3.78 | 0.77 | 0 | 5.41E−03 | −3.06 | 8.3 |
| hsa-asg-1765_st1 | 2.56 | 0.55 | 0 | 8.03E−04 | −3.03 | 8.2 |
| hsa-asg-9512_st1 | 6.23 | 1.01 | 11 | 2.21E−02 | −3.02 | 8.1 |
| hsa-asg-12139_st2 | 2.32 | 0.59 | 0 | 1.25E−03 | −3.02 | 8.1 |
| hsa-asg-7751_st2 | 3.42 | 1.17 | 0 | 4.07E−02 | −3.00 | 8.0 |
| hsa-asg-7292_st1 | 7.74 | 0.76 | 100 | 5.83E−03 | −2.99 | 7.9 |
| hsa-asg-128_st2 | 4.58 | 0.35 | 0 | 4.32E−05 | −2.98 | 7.9 |
| hsa-asg-7550_st1 | 3.40 | 0.83 | 0 | 9.24E−03 | −2.97 | 7.8 |
| hsa-miR-376a | 4.34 | 1.02 | 0 | 2.52E−02 | −2.95 | 7.7 |
| hsa-miR-376a | 4.83 | 0.75 | 11 | 6.93E−03 | −2.86 | 7.3 |
| hsa-miR-376a | 3.57 | 0.86 | 0 | 1.72E−02 | −2.73 | 6.6 |
| hsa-asg-10131_st2 | 3.22 | 0.79 | 0 | 8.07E−03 | −2.91 | 7.5 |
| hsa-asg-13070_st1 | 2.54 | 0.79 | 0 | 8.55E−03 | −2.89 | 7.4 |
| hsa-miR-95 | 9.00 | 0.80 | 100 | 8.89E−03 | −2.89 | 7.4 |
| hsa-asg-4864_st1 | 6.35 | 1.14 | 78 | 4.41E−02 | −2.87 | 7.3 |
| hsa-asg-3597_st2 | 6.60 | 0.88 | 78 | 1.49E−02 | −2.87 | 7.3 |
| hsa-asg-9201_st2 | 5.48 | 0.87 | 11 | 1.43E−02 | −2.85 | 7.2 |
| hsa-asg-8079_st1 | 4.71 | 0.91 | 11 | 1.76E−02 | −2.85 | 7.2 |
| hsa-miR-135b | 2.57 | 0.55 | 0 | 1.19E−03 | −2.85 | 7.2 |
| hsa-miR-135b | 3.18 | 0.75 | 0 | 2.63E−02 | −2.16 | 4.5 |
| hsa-asg-13888_st2 | 2.24 | 0.60 | 0 | 2.02E−03 | −2.83 | 7.1 |
| hsa-asg-11777_st1 | 2.48 | 0.60 | 0 | 1.97E−03 | −2.83 | 7.1 |
| hsa-miR-138 | 5.62 | 0.80 | 33 | 1.09E−02 | −2.78 | 6.9 |
| hsa-asg-10080_st1 | 2.31 | 0.48 | 0 | 5.84E−04 | −2.77 | 6.8 |
| hsa-asg-5119_st1 | 2.49 | 0.55 | 0 | 1.46E−03 | −2.77 | 6.8 |
| hsa-asg-9082_st1 | 2.99 | 0.89 | 0 | 1.88E−02 | −2.76 | 6.8 |
| hsa-asg-5728_st2 | 6.35 | 0.64 | 67 | 3.42E−03 | −2.76 | 6.8 |
| hsa-asg-5189_st2 | 7.86 | 1.00 | 100 | 3.13E−02 | −2.74 | 6.7 |
| hsa-asg-677_st2 | 4.04 | 0.72 | 0 | 7.13E−03 | −2.74 | 6.7 |
| hsa-asg-13077_st1 | 4.76 | 0.95 | 44 | 2.65E−02 | −2.73 | 6.6 |
| hsa-asg-3822_st2 | 2.72 | 0.99 | 0 | 3.11E−02 | −2.72 | 6.6 |
| hsa-asg-388_st1 | 8.33 | 0.95 | 100 | 2.69E−02 | −2.72 | 6.6 |
| hsa-asg-13083_st1 | 7.75 | 0.96 | 78 | 2.79E−02 | −2.71 | 6.5 |
| hsa-asg-11235_st2 | 5.28 | 0.98 | 22 | 3.09E−02 | −2.70 | 6.5 |
| hsa-miR-424 | 5.69 | 0.98 | 89 | 3.18E−02 | −2.68 | 6.4 |
| hsa-miR-450 | 2.79 | 0.42 | 0 | 2.89E−04 | −2.67 | 6.4 |
| hsa-miR-450 | 3.76 | 0.62 | 0 | 6.27E−03 | −2.39 | 5.3 |
| hsa-asg-1898_st1 | 5.52 | 0.81 | 11 | 1.43E−02 | −2.66 | 6.3 |
| hsa-asg-8542_st2 | 8.66 | 0.92 | 44 | 2.62E−02 | −2.65 | 6.3 |
| hsa-asg-13559_st2 | 6.26 | 0.99 | 56 | 3.48E−02 | −2.65 | 6.3 |
| hsa-asg-12356_st1 | 7.43 | 1.05 | 78 | 4.57E−02 | −2.62 | 6.2 |
| hsa-asg-12996_st1 | 5.94 | 0.98 | 56 | 3.55E−02 | −2.62 | 6.1 |
| hsa-asg-9547_st2 | 3.97 | 0.72 | 0 | 8.69E−03 | −2.61 | 6.1 |
| hsa-asg-4978_st2 | 2.49 | 0.79 | 0 | 1.43E−02 | −2.58 | 6.0 |
| hsa-asg-3998_st1 | 8.75 | 0.35 | 100 | 1.15E−04 | −2.56 | 5.9 |
| hsa-asg-8683_st1 | 6.47 | 0.83 | 67 | 1.97E−02 | −2.54 | 5.8 |
| hsa-asg-378_st1 | 2.71 | 0.96 | 0 | 3.64E−02 | −2.53 | 5.8 |
| hsa-asg-3009_st1 | 4.75 | 0.69 | 0 | 8.21E−03 | −2.53 | 5.8 |
| hsa-asg-6139_st2 | 2.31 | 0.60 | 0 | 3.97E−03 | −2.52 | 5.7 |
| hsa-asg-2424_st1 | 1.84 | 0.63 | 0 | 5.52E−03 | −2.52 | 5.7 |
| hsa-asg-9453_st2 | 6.94 | 0.77 | 33 | 1.49E−02 | −2.51 | 5.7 |
| hsa-asg-13387_st1 | 4.34 | 0.93 | 0 | 3.37E−02 | −2.51 | 5.7 |
| hsa-asg-1273_st2 | 7.17 | 1.02 | 0 | 4.85E−02 | −2.50 | 5.7 |
| hsa-asg-4903_st2 | 7.45 | 0.96 | 0 | 3.80E−02 | −2.50 | 5.7 |
| hsa-asg-11698_st2 | 7.99 | 1.00 | 89 | 4.49E−02 | −2.50 | 5.6 |
| hsa-asg-8293_st2 | 6.47 | 0.79 | 0 | 1.76E−02 | −2.49 | 5.6 |
| hsa-asg-7472_st2 | 1.97 | 0.85 | 0 | 2.38E−02 | −2.49 | 5.6 |
| hsa-asg-12289_st1 | 9.02 | 0.78 | 67 | 1.66E−02 | −2.47 | 5.5 |
| hsa-asg-1270_st2 | 3.63 | 0.90 | 0 | 3.15E−02 | −2.47 | 5.5 |
| hsa-asg-1751_st2 | 7.92 | 0.95 | 22 | 4.00E−02 | −2.46 | 5.5 |
| hsa-asg-6948_st2 | 7.53 | 0.83 | 100 | 2.28E−02 | −2.45 | 5.5 |
| hsa-asg-3933_st1 | 6.92 | 0.95 | 33 | 4.10E−02 | −2.45 | 5.5 |
| hsa-miR-422a | 9.20 | 0.33 | 100 | 1.13E−04 | −2.44 | 5.4 |
| hsa-asg-8541_st1 | 8.46 | 0.67 | 33 | 8.70E−03 | −2.42 | 5.4 |
| hsa-asg-3230_st1 | 6.60 | 0.85 | 67 | 2.65E−02 | −2.42 | 5.4 |
| hsa-asg-7020_st1 | 1.99 | 0.37 | 0 | 2.54E−04 | −2.42 | 5.4 |
| hsa-asg-6813_st2 | 4.42 | 0.78 | 22 | 1.92E−02 | −2.41 | 5.3 |
| hsa-asg-3742_st1 | 4.03 | 0.55 | 0 | 3.13E−03 | −2.41 | 5.3 |
| hsa-asg-11802_st1 | 6.99 | 0.97 | 0 | 4.67E−02 | −2.40 | 5.3 |
| hsa-asg-9434_st2 | 6.34 | 0.68 | 67 | 1.04E−02 | −2.40 | 5.3 |
| hsa-asg-6277_st2 | 6.00 | 0.94 | 67 | 4.30E−02 | −2.38 | 5.2 |
| hsa-asg-7527_st2 | 4.21 | 0.80 | 0 | 2.22E−02 | −2.37 | 5.2 |
| hsa-asg-9382_st2 | 6.40 | 0.75 | 67 | 1.75E−02 | −2.37 | 5.2 |
| hsa-asg-1619_st2 | 3.30 | 0.78 | 0 | 2.13E−02 | −2.36 | 5.1 |
| hsa-asg-960_st1 | 7.80 | 0.85 | 100 | 3.06E−02 | −2.35 | 5.1 |
| hsa-asg-12526_st1 | 4.04 | 0.84 | 0 | 2.98E−02 | −2.35 | 5.1 |
| hsa-asg-8305_st2 | 6.71 | 0.81 | 78 | 2.52E−02 | −2.35 | 5.1 |
| hsa-cand443_st2 | 4.59 | 0.68 | 33 | 1.13E−02 | −2.34 | 5.1 |
| hsa-asg-6068_st2 | 5.24 | 0.73 | 33 | 1.65E−02 | −2.34 | 5.1 |
| hsa-asg-12016_st2 | 2.46 | 0.84 | 0 | 2.96E−02 | −2.33 | 5.0 |
| hsa-asg-2314_st1 | 6.14 | 0.56 | 44 | 4.23E−03 | −2.32 | 5.0 |
| hsa-asg-9514_st1 | 3.43 | 0.79 | 0 | 2.31E−02 | −2.32 | 5.0 |
| hsa-asg-11320_st2 | 4.22 | 0.31 | 0 | 1.13E−04 | −2.30 | 4.9 |
| hsa-asg-13878_st2 | 3.21 | 0.90 | 0 | 4.25E−02 | −2.30 | 4.9 |
| hsa-asg-2195_st1 | 9.24 | 0.90 | 89 | 4.23E−02 | −2.28 | 4.8 |
| hsa-asg-3614_st1 | 4.49 | 0.59 | 0 | 6.63E−03 | −2.27 | 4.8 |
| hsa-asg-11361_st2 | 3.39 | 0.52 | 0 | 3.19E−03 | −2.27 | 4.8 |
| hsa-asg-2580_st1 | 7.25 | 0.67 | 100 | 1.30E−02 | −2.26 | 4.8 |
| hsa-asg-6637_st1 | 7.07 | 0.67 | 100 | 1.31E−02 | −2.25 | 4.8 |
| hsa-asg-5163_st1 | 7.45 | 0.84 | 0 | 3.51E−02 | −2.25 | 4.7 |
| hsa-asg-8174_st1 | 3.21 | 0.53 | 0 | 3.86E−03 | −2.24 | 4.7 |
| hsa-asg-9053_st1 | 5.85 | 0.69 | 33 | 1.47E−02 | −2.24 | 4.7 |
| hsa-asg-7250_st1 | 3.77 | 0.78 | 0 | 2.61E−02 | −2.24 | 4.7 |
| hsa-asg-3545_st1 | 7.27 | 0.73 | 100 | 2.00E−02 | −2.23 | 4.7 |
| hsa-asg-3672_st1 | 5.18 | 0.80 | 11 | 3.01E−02 | −2.22 | 4.7 |
| hsa-asg-3912_st1 | 2.27 | 0.74 | 0 | 2.09E−02 | −2.22 | 4.7 |
| hsa-asg-9830_st2 | 2.66 | 0.76 | 0 | 2.48E−02 | −2.22 | 4.7 |
| hsa-asg-13741_st2 | 1.94 | 0.86 | 0 | 4.08E−02 | −2.22 | 4.6 |
| hsa-asg-11626_st1 | 6.90 | 0.77 | 89 | 2.65E−02 | −2.20 | 4.6 |
| hsa-asg-9009_st1 | 4.59 | 0.61 | 0 | 8.96E−03 | −2.20 | 4.6 |
| hsa-asg-7439_st1 | 5.07 | 0.90 | 22 | 4.90E−02 | −2.20 | 4.6 |
| hsa-asg-10360_st1 | 3.29 | 0.63 | 0 | 1.12E−02 | −2.19 | 4.6 |
| hsa-asg-4140_st2 | 3.58 | 0.49 | 0 | 2.71E−03 | −2.19 | 4.6 |
| hsa-cand266_st1 | 6.38 | 0.76 | 78 | 2.67E−02 | −2.18 | 4.5 |
| hsa-asg-11160_st2 | 3.21 | 0.79 | 0 | 3.05E−02 | −2.18 | 4.5 |
| hsa-asg-1040_st2 | 5.78 | 0.73 | 22 | 2.18E−02 | −2.18 | 4.5 |
| hsa-asg-2615_st2 | 8.27 | 0.77 | 100 | 2.78E−02 | −2.18 | 4.5 |
| hsa-asg-12687_st1 | 7.27 | 0.74 | 89 | 2.34E−02 | −2.18 | 4.5 |
| hsa-asg-1794_st1 | 1.97 | 0.57 | 0 | 6.58E−03 | −2.18 | 4.5 |
| hsa-asg-466_st1 | 4.59 | 0.79 | 0 | 3.25E−02 | −2.16 | 4.5 |
| hsa-miR-599 | 3.41 | 0.78 | 0 | 2.99E−02 | −2.16 | 4.5 |
| hsa-asg-11962_st1 | 6.76 | 0.75 | 78 | 2.57E−02 | −2.16 | 4.5 |
| hsa-asg-11993_st1 | 7.75 | 0.79 | 0 | 3.25E−02 | −2.15 | 4.4 |
| hsa-cand926_st2 | 3.81 | 0.68 | 0 | 1.66E−02 | −2.15 | 4.4 |
| hsa-asg-3782_st1 | 6.10 | 0.57 | 0 | 7.24E−03 | −2.14 | 4.4 |
| hsa-asg-8428_st2 | 1.79 | 0.81 | 0 | 3.71E−02 | −2.13 | 4.4 |
| hsa-asg-10414_st1 | 7.28 | 0.75 | 89 | 2.68E−02 | −2.13 | 4.4 |
| hsa-asg-6282_st1 | 6.01 | 0.82 | 56 | 3.98E−02 | −2.13 | 4.4 |
| hsa-asg-6063_st2 | 8.75 | 0.61 | 56 | 1.08E−02 | −2.12 | 4.4 |
| hsa-asg-12441_st1 | 7.56 | 0.79 | 78 | 3.38E−02 | −2.12 | 4.3 |
| hsa-asg-11923_st1 | 3.52 | 0.73 | 0 | 2.55E−02 | −2.12 | 4.3 |
| hsa-asg-13613_st2 | 7.71 | 0.74 | 100 | 2.72E−02 | −2.11 | 4.3 |
| hsa-asg-12376_st2 | 5.79 | 0.57 | 44 | 7.95E−03 | −2.10 | 4.3 |
| hsa-asg-8565_st1 | 6.32 | 0.60 | 67 | 1.07E−02 | −2.09 | 4.3 |
| hsa-asg-1612_st1 | 3.17 | 0.72 | 0 | 2.50E−02 | −2.07 | 4.2 |
| hsa-asg-1277_st1 | 8.19 | 0.69 | 100 | 2.25E−02 | −2.07 | 4.2 |
| hsa-asg-3462_st2 | 8.27 | 0.83 | 100 | 4.63E−02 | −2.06 | 4.2 |
| hsa-asg-7704_st2 | 5.39 | 0.73 | 33 | 2.80E−02 | −2.06 | 4.2 |
| hsa-asg-1596_st2 | 4.20 | 0.49 | 0 | 3.98E−03 | −2.06 | 4.2 |
| hsa-asg-11165_st1 | 7.32 | 0.77 | 0 | 3.41E−02 | −2.06 | 4.2 |
| hsa-asg-9099_st2 | 4.01 | 0.82 | 11 | 4.47E−02 | −2.06 | 4.2 |
| hsa-asg-5413_st2 | 5.66 | 0.62 | 33 | 1.39E−02 | −2.05 | 4.1 |
| hsa-asg-11940_st1 | 5.55 | 0.70 | 22 | 2.38E−02 | −2.04 | 4.1 |
| hsa-asg-4069_st1 | 4.12 | 0.67 | 0 | 2.11E−02 | −2.03 | 4.1 |
| hsa-asg-3646_st1 | 4.10 | 0.75 | 0 | 3.45E−02 | −2.02 | 4.1 |
| hsa-asg-8138_st2 | 5.63 | 0.79 | 44 | 4.22E−02 | −2.02 | 4.1 |
| hsa-cand899_st2 | 4.04 | 0.78 | 0 | 3.87E−02 | −2.02 | 4.1 |
| hsa-asg-7159_st2 | 3.35 | 0.62 | 0 | 1.52E−02 | −2.02 | 4.1 |
| hsa-miR112_st1 | 7.38 | 0.70 | 0 | 2.62E−02 | −2.02 | 4.0 |
| hsa-asg-7654_st2 | 6.79 | 0.72 | 89 | 2.90E−02 | −2.01 | 4.0 |
| hsa-asg-7954_st1 | 7.09 | 0.74 | 44 | 3.29E−02 | −2.01 | 4.0 |
| hsa-asg-8329_st1 | 5.65 | 0.77 | 56 | 3.94E−02 | −2.00 | 4.0 |
| hsa-miR-200a* | 2.72 | 0.64 | 0 | 1.84E−02 | −2.00 | 4.0 |
| hsa-asg-807_st2 | 4.86 | 0.52 | 11 | 6.73E−03 | −2.00 | 4.0 |
| hsa-asg-12556_st1 | 7.66 | 0.76 | 78 | 3.70E−02 | −1.99 | 4.0 |
| hsa-asg-1576_st1 | 7.51 | 0.46 | 100 | 3.36E−03 | −1.99 | 4.0 |
| hsa-asg-265_st2 | 5.97 | 0.74 | 44 | 3.38E−02 | −1.99 | 4.0 |
| hsa-asg-13471_st1 | 4.61 | 0.61 | 11 | 1.49E−02 | −1.99 | 4.0 |
| hsa-asg-10055_st1 | 1.94 | 0.66 | 0 | 2.14E−02 | −1.98 | 4.0 |
| hsa-cand630_st2 | 5.08 | 0.66 | 0 | 2.19E−02 | −1.98 | 3.9 |
| hsa-asg-4207_st1 | 4.78 | 0.71 | 0 | 2.97E−02 | −1.98 | 3.9 |
| hsa-miR-422b | 10.7 | 0.28 | 100 | 1.63E−04 | −1.98 | 3.9 |
| hsa-asg-4283_st2 | 3.19 | 0.65 | 0 | 2.04E−02 | −1.98 | 3.9 |
| hsa-cand330_st2 | 4.19 | 0.80 | 11 | 4.65E−02 | −1.98 | 3.9 |
| hsa-asg-10478_st2 | 3.39 | 0.69 | 0 | 2.69E−02 | −1.97 | 3.9 |
| hsa-asg-3740_st1 | 5.10 | 0.74 | 0 | 3.46E−02 | −1.97 | 3.9 |
| hsa-cand852_st2 | 2.68 | 0.51 | 0 | 6.79E−03 | −1.96 | 3.9 |
| hsa-asg-3150_st1 | 6.15 | 0.62 | 56 | 1.75E−02 | −1.95 | 3.9 |
| hsa-asg-6339_st1 | 7.43 | 0.53 | 100 | 8.69E−03 | −1.93 | 3.8 |
| hsa-asg-11973_st2 | 6.68 | 0.41 | 100 | 2.11E−03 | −1.93 | 3.8 |
| hsa-asg-3746_st1 | 7.62 | 0.73 | 100 | 3.72E−02 | −1.93 | 3.8 |
| hsa-asg-12440_st2 | 4.66 | 0.38 | 0 | 1.27E−03 | −1.93 | 3.8 |
| hsa-asg-3754_st2 | 4.81 | 0.57 | 0 | 1.21E−02 | −1.92 | 3.8 |
| hsa-asg-8893_st1 | 4.70 | 0.55 | 0 | 1.09E−02 | −1.92 | 3.8 |
| hsa-asg-3728_st1 | 6.29 | 0.69 | 56 | 3.01E−02 | −1.92 | 3.8 |
| hsa-asg-2624_st2 | 2.73 | 0.72 | 0 | 3.68E−02 | −1.91 | 3.8 |
| hsa-cand805_st2 | 8.14 | 0.68 | 100 | 2.94E−02 | −1.91 | 3.7 |
| hsa-asg-10043_st1 | 2.60 | 0.54 | 0 | 9.92E−03 | −1.90 | 3.7 |
| hsa-asg-3406_st1 | 3.44 | 0.60 | 0 | 1.70E−02 | −1.90 | 3.7 |
| hsa-asg-7671_st1 | 6.26 | 0.67 | 78 | 2.87E−02 | −1.89 | 3.7 |
| hsa-asg-1127_st2 | 3.54 | 0.54 | 0 | 1.09E−02 | −1.88 | 3.7 |
| hsa-asg-7228_st1 | 5.22 | 0.76 | 0 | 4.83E−02 | −1.88 | 3.7 |
| hsa-asg-4786_st1 | 6.85 | 0.66 | 89 | 2.76E−02 | −1.86 | 3.6 |
| hsa-asg-7388_st1 | 6.28 | 0.56 | 67 | 1.40E−02 | −1.86 | 3.6 |
| hsa-asg-7579_st2 | 5.59 | 0.73 | 33 | 4.33E−02 | −1.86 | 3.6 |
| hsa-miR-517c | 2.70 | 0.70 | 0 | 3.69E−02 | −1.85 | 3.6 |
| hsa-asg-12760_st2 | 3.74 | 0.60 | 0 | 1.97E−02 | −1.85 | 3.6 |
| hsa-asg-4872_st1 | 3.56 | 0.68 | 0 | 3.38E−02 | −1.83 | 3.6 |
| hsa-asg-9273_st2 | 9.29 | 0.74 | 100 | 4.65E−02 | −1.83 | 3.6 |
| hsa-asg-9511_st2 | 6.67 | 0.47 | 100 | 6.12E−03 | −1.83 | 3.6 |
| hsa-cand441_st2 | 7.31 | 0.70 | 56 | 3.73E−02 | −1.83 | 3.6 |
| hsa-asg-9270_st1 | 2.79 | 0.74 | 0 | 4.63E−02 | −1.83 | 3.6 |
| hsa-asg-8193_st2 | 4.73 | 0.65 | 11 | 2.85E−02 | −1.83 | 3.6 |
| hsa-asg-9412_st2 | 6.96 | 0.71 | 89 | 3.97E−02 | −1.82 | 3.5 |
| hsa-asg-12735_st1 | 6.44 | 0.63 | 78 | 2.56E−02 | −1.82 | 3.5 |
| hsa-asg-5241_st1 | 3.17 | 0.52 | 0 | 1.12E−02 | −1.81 | 3.5 |
| hsa-asg-6958_st2 | 4.27 | 0.55 | 0 | 1.46E−02 | −1.81 | 3.5 |
| hsa-asg-1922_st2 | 5.57 | 0.42 | 0 | 3.73E−03 | −1.81 | 3.5 |
| hsa-asg-5149_st2 | 4.86 | 0.51 | 0 | 1.01E−02 | −1.80 | 3.5 |
| hsa-asg-5385_st2 | 5.80 | 0.40 | 33 | 2.84E−03 | −1.80 | 3.5 |
| hsa-asg-4847_st1 | 6.80 | 0.63 | 78 | 2.66E−02 | −1.79 | 3.5 |
| hsa-cand6_st2 | 6.91 | 0.55 | 89 | 1.46E−02 | −1.79 | 3.5 |
| hsa-asg-809_st2 | 5.64 | 0.71 | 56 | 4.50E−02 | −1.77 | 3.4 |
| hsa-asg-748_st1 | 4.68 | 0.66 | 11 | 3.55E−02 | −1.77 | 3.4 |
| hsa-asg-1187_st2 | 5.65 | 0.64 | 11 | 2.99E−02 | −1.76 | 3.4 |
| hsa-asg-9248_st2 | 8.14 | 0.72 | 100 | 4.94E−02 | −1.76 | 3.4 |
| hsa-asg-4759_st1 | 6.82 | 0.72 | 89 | 4.96E−02 | −1.76 | 3.4 |
| hsa-asg-5289_st2 | 6.05 | 0.70 | 56 | 4.56E−02 | −1.75 | 3.4 |
| hsa-asg-6129_st2 | 6.89 | 0.55 | 89 | 1.72E−02 | −1.75 | 3.4 |
| hsa-asg-13997_st2 | 2.51 | 0.65 | 0 | 3.42E−02 | −1.75 | 3.4 |
| hsa-asg-8552_st2 | 10.5 | 0.62 | 100 | 2.79E−02 | −1.74 | 3.3 |
| hsa-asg-3030_st2 | 3.71 | 0.51 | 0 | 1.22E−02 | −1.74 | 3.3 |
| hsa-asg-7278_st1 | 5.02 | 0.58 | 11 | 2.18E−02 | −1.73 | 3.3 |
| hsa-asg-9165_st1 | 6.63 | 0.69 | 22 | 4.34E−02 | −1.73 | 3.3 |
| hsa-asg-6149_st2 | 6.97 | 0.68 | 33 | 4.22E−02 | −1.73 | 3.3 |
| hsa-asg-2637_st1 | 4.13 | 0.52 | 0 | 1.35E−02 | −1.73 | 3.3 |
| hsa-asg-4814_st1 | 6.24 | 0.58 | 78 | 2.24E−02 | −1.72 | 3.3 |
| hsa-asg-9287_st2 | 5.62 | 0.64 | 11 | 3.44E−02 | −1.72 | 3.3 |
| hsa-asg-14051_st2 | 6.57 | 0.55 | 67 | 1.79E−02 | −1.72 | 3.3 |
| hsa-asg-12515_st2 | 3.98 | 0.45 | 0 | 6.72E−03 | −1.72 | 3.3 |
| hsa-asg-1293_st2 | 6.04 | 0.52 | 56 | 1.39E−02 | −1.71 | 3.3 |
| hsa-asg-7471_st1 | 5.65 | 0.52 | 56 | 1.41E−02 | −1.71 | 3.3 |
| hsa-asg-8675_st1 | 5.69 | 0.55 | 22 | 1.92E−02 | −1.70 | 3.3 |
| hsa-asg-13999_st1 | 7.35 | 0.60 | 0 | 2.79E−02 | −1.70 | 3.3 |
| hsa-asg-10772_st1 | 6.20 | 0.47 | 0 | 9.20E−03 | −1.69 | 3.2 |
| hsa-asg-12395_st2 | 5.64 | 0.64 | 44 | 3.52E−02 | −1.69 | 3.2 |
| hsa-asg-4703_st2 | 5.24 | 0.55 | 22 | 1.93E−02 | −1.69 | 3.2 |
| hsa-asg-9507_st1 | 9.14 | 0.66 | 78 | 4.13E−02 | −1.69 | 3.2 |
| hsa-asg-7336_st1 | 5.55 | 0.59 | 22 | 2.75E−02 | −1.69 | 3.2 |
| hsa-asg-9262_st1 | 4.46 | 0.58 | 0 | 2.41E−02 | −1.68 | 3.2 |
| hsa-asg-12298_st1 | 4.02 | 0.57 | 0 | 2.42E−02 | −1.67 | 3.2 |
| hsa-asg-5176_st2 | 2.46 | 0.54 | 0 | 1.94E−02 | −1.66 | 3.2 |
| hsa-asg-11714_st2 | 8.25 | 0.68 | 11 | 4.89E−02 | −1.66 | 3.2 |
| hsa-asg-3345_st1 | 7.81 | 0.55 | 100 | 2.15E−02 | −1.65 | 3.1 |
| hsa-asg-12625_st1 | 3.79 | 0.67 | 0 | 4.77E−02 | −1.65 | 3.1 |
| hsa-asg-12014_st2 | 8.26 | 0.54 | 100 | 2.06E−02 | −1.63 | 3.1 |
| hsa-asg-124_st1 | 5.02 | 0.44 | 0 | 7.54E−03 | −1.63 | 3.1 |
| hsa-asg-4840_st1 | 4.80 | 0.61 | 11 | 3.54E−02 | −1.63 | 3.1 |
| hsa-asg-10971_st2 | 6.01 | 0.54 | 78 | 2.19E−02 | −1.62 | 3.1 |
| hsa-asg-9879_st1 | 3.19 | 0.63 | 0 | 4.04E−02 | −1.62 | 3.1 |
| hsa-asg-11795_st2 | 5.44 | 0.59 | 22 | 3.09E−02 | −1.61 | 3.1 |
| hsa-asg-3952_st1 | 8.62 | 0.62 | 44 | 3.87E−02 | −1.61 | 3.1 |
| hsa-miR-576 | 2.31 | 0.52 | 0 | 1.91E−02 | −1.61 | 3.1 |
| hsa-asg-14025_st1 | 6.04 | 0.54 | 56 | 2.18E−02 | −1.61 | 3.1 |
| hsa-asg-13135_st1 | 5.11 | 0.44 | 22 | 8.15E−03 | −1.61 | 3.1 |
| hsa-asg-8872_st1 | 7.17 | 0.64 | 89 | 4.64E−02 | −1.60 | 3.0 |
| hsa-asg-11391_st1 | 2.12 | 0.63 | 0 | 4.23E−02 | −1.60 | 3.0 |
| hsa-asg-8163_st1 | 8.85 | 0.64 | 100 | 4.58E−02 | −1.60 | 3.0 |
| hsa-asg-12777_st2 | 5.91 | 0.48 | 67 | 1.32E−02 | −1.60 | 3.0 |
| hsa-asg-10589_st1 | 2.13 | 0.61 | 0 | 3.82E−02 | −1.59 | 3.0 |
| hsa-asg-1893_st2 | 7.61 | 0.63 | 100 | 4.50E−02 | −1.58 | 3.0 |
| hsa-asg-8173_st1 | 6.80 | 0.64 | 89 | 4.67E−02 | −1.58 | 3.0 |
| hsa-asg-5265_st1 | 6.53 | 0.50 | 89 | 1.69E−02 | −1.58 | 3.0 |
| hsa-asg-6961_st2 | 5.19 | 0.54 | 0 | 2.53E−02 | −1.57 | 3.0 |
| hsa-asg-12150_st1 | 7.83 | 0.61 | 100 | 4.12E−02 | −1.56 | 2.9 |
| hsa-asg-6618_st2 | 5.37 | 0.49 | 22 | 1.70E−02 | −1.56 | 2.9 |
| hsa-asg-14230_st1 | 3.82 | 0.58 | 0 | 3.55E−02 | −1.55 | 2.9 |
| hsa-asg-938_st2 | 6.51 | 0.60 | 78 | 4.03E−02 | −1.54 | 2.9 |
| hsa-asg-9515_st1 | 5.51 | 0.41 | 33 | 7.33E−03 | −1.53 | 2.9 |
| hsa-asg-9500_st1 | 3.91 | 0.48 | 0 | 1.70E−02 | −1.53 | 2.9 |
| hsa-miR223_st2 | 5.38 | 0.47 | 0 | 1.57E−02 | −1.52 | 2.9 |
| hsa-miR-498 | 5.49 | 0.55 | 44 | 3.05E−02 | −1.52 | 2.9 |
| hsa-asg-14217_st1 | 5.36 | 0.61 | 0 | 4.58E−02 | −1.52 | 2.9 |
| hsa-asg-1227_st1 | 4.37 | 0.60 | 0 | 4.52E−02 | −1.50 | 2.8 |
| hsa-asg-8490_st1 | 6.02 | 0.35 | 11 | 3.58E−03 | −1.49 | 2.8 |
| hsa-asg-8639_st2 | 8.92 | 0.53 | 78 | 2.80E−02 | −1.49 | 2.8 |
| hsa-asg-6500_st1 | 4.77 | 0.59 | 0 | 4.46E−02 | −1.48 | 2.8 |
| hsa-asg-1715_st2 | 3.25 | 0.58 | 0 | 4.20E−02 | −1.47 | 2.8 |
| hsa-asg-9334_st2 | 6.71 | 0.50 | 89 | 2.42E−02 | −1.47 | 2.8 |
| hsa-asg-8896_st2 | 4.78 | 0.54 | 0 | 3.43E−02 | −1.46 | 2.7 |
| hsa-asg-10175_st2 | 2.19 | 0.44 | 0 | 1.37E−02 | −1.45 | 2.7 |
| hsa-miR-503 | 6.62 | 0.46 | 78 | 1.83E−02 | −1.45 | 2.7 |
| hsa-asg-13197_st1 | 2.87 | 0.47 | 0 | 1.90E−02 | −1.44 | 2.7 |
| hsa-asg-1168_st1 | 6.00 | 0.55 | 44 | 3.73E−02 | −1.44 | 2.7 |
| hsa-asg-5047_st1 | 4.62 | 0.58 | 11 | 4.56E−02 | −1.44 | 2.7 |
| hsa-asg-773_st1 | 6.88 | 0.47 | 100 | 1.91E−02 | −1.44 | 2.7 |
| hsa-miR-379 | 6.58 | 0.37 | 100 | 6.02E−03 | −1.44 | 2.7 |
| hsa-asg-2041_st1 | 5.59 | 0.40 | 33 | 9.29E−03 | −1.44 | 2.7 |
| hsa-asg-9253_st2 | 2.46 | 0.51 | 0 | 2.99E−02 | −1.43 | 2.7 |
| hsa-asg-8636_st2 | 6.14 | 0.54 | 67 | 3.60E−02 | −1.42 | 2.7 |
| hsa-asg-1903_st2 | 8.88 | 0.52 | 100 | 3.40E−02 | −1.40 | 2.6 |
| hsa-asg-13334_st2 | 2.99 | 0.41 | 0 | 1.18E−02 | −1.39 | 2.6 |
| hsa-miR165_st1 | 5.22 | 0.38 | 11 | 8.91E−03 | −1.39 | 2.6 |
| hsa-asg-2862_st1 | 6.81 | 0.37 | 22 | 7.66E−03 | −1.38 | 2.6 |
| hsa-asg-9050_st1 | 7.49 | 0.47 | 100 | 2.48E−02 | −1.37 | 2.6 |
| hsa-asg-8946_st1 | 4.45 | 0.56 | 0 | 4.86E−02 | −1.37 | 2.6 |
| hsa-asg-9209_st2 | 6.38 | 0.39 | 67 | 1.10E−02 | −1.37 | 2.6 |
| hsa-asg-956_st2 | 2.94 | 0.50 | 0 | 3.30E−02 | −1.37 | 2.6 |
| hsa-asg-8188_st1 | 7.01 | 0.56 | 89 | 4.85E−02 | −1.36 | 2.6 |
| hsa-asg-2849_st2 | 3.38 | 0.55 | 33 | 4.59E−02 | −1.36 | 2.6 |
| hsa-asg-13350_st2 | 8.61 | 0.41 | 44 | 1.62E−02 | −1.31 | 2.5 |
| hsa-asg-9687_st1 | 4.15 | 0.47 | 0 | 2.90E−02 | −1.31 | 2.5 |
| hsa-asg-6924_st1 | 6.55 | 0.48 | 78 | 3.22E−02 | −1.30 | 2.5 |
| hsa-miR-491 | 5.47 | 0.33 | 0 | 5.59E−03 | −1.29 | 2.5 |
| hsa-asg-6890_st1 | 4.28 | 0.24 | 0 | 8.58E−04 | −1.29 | 2.4 |
| hsa-asg-10291_st2 | 3.87 | 0.48 | 0 | 3.34E−02 | −1.29 | 2.4 |
| hsa-cand960_st2 | 4.87 | 0.47 | 11 | 3.24E−02 | −1.29 | 2.4 |
| hsa-asg-961_st1 | 3.90 | 0.50 | 0 | 4.07E−02 | −1.28 | 2.4 |
| hsa-asg-3126_st1 | 3.85 | 0.48 | 0 | 3.47E−02 | −1.28 | 2.4 |
| hsa-asg-8039_st2 | 3.58 | 0.49 | 0 | 3.86E−02 | −1.27 | 2.4 |
| hsa-asg-11481_st2 | 3.68 | 0.38 | 0 | 1.38E−02 | −1.26 | 2.4 |
| hsa-asg-10065_st1 | 4.11 | 0.39 | 0 | 1.50E−02 | −1.25 | 2.4 |
| hsa-asg-1319_st2 | 5.73 | 0.46 | 11 | 3.24E−02 | −1.25 | 2.4 |
| hsa-asg-7170_st2 | 3.91 | 0.49 | 0 | 4.18E−02 | −1.24 | 2.4 |
| hsa-asg-1689_st2 | 5.41 | 0.36 | 11 | 1.12E−02 | −1.24 | 2.4 |
| hsa-asg-9491_st1 | 4.55 | 0.45 | 0 | 3.06E−02 | −1.24 | 2.4 |
| hsa-asg-381_st1 | 3.30 | 0.40 | 0 | 1.82E−02 | −1.24 | 2.4 |
| hsa-asg-8253_st2 | 9.70 | 0.50 | 100 | 4.74E−02 | −1.23 | 2.3 |
| hsa-cand753_st1 | 5.36 | 0.40 | 33 | 2.05E−02 | −1.22 | 2.3 |
| hsa-asg-2542_st1 | 4.87 | 0.50 | 0 | 4.89E−02 | −1.22 | 2.3 |
| hsa-asg-125_st1 | 8.08 | 0.43 | 0 | 2.80E−02 | −1.22 | 2.3 |
| hsa-asg-3722_st1 | 8.92 | 0.37 | 100 | 1.48E−02 | −1.19 | 2.3 |
| hsa-asg-4208_st1 | 3.66 | 0.37 | 0 | 1.60E−02 | −1.19 | 2.3 |
| hsa-asg-9411_st1 | 5.09 | 0.34 | 11 | 1.10E−02 | −1.18 | 2.3 |
| hsa-asg-11900_st1 | 5.69 | 0.45 | 56 | 3.57E−02 | −1.18 | 2.3 |
| hsa-asg-3224_st1 | 4.18 | 0.45 | 0 | 3.81E−02 | −1.17 | 2.2 |
| hsa-cand659_st1 | 7.78 | 0.25 | 100 | 2.50E−03 | −1.16 | 2.2 |
| hsa-asg-12874_st1 | 4.42 | 0.33 | 0 | 1.18E−02 | −1.14 | 2.2 |
| hsa-asg-12216_st1 | 3.69 | 0.27 | 0 | 4.10E−03 | −1.12 | 2.2 |
| hsa-asg-917_st2 | 5.13 | 0.43 | 33 | 3.79E−02 | −1.11 | 2.2 |
| hsa-asg-6845_st2 | 2.70 | 0.33 | 0 | 1.35E−02 | −1.09 | 2.1 |
| hsa-asg-1896_st2 | 3.13 | 0.44 | 0 | 4.60E−02 | −1.08 | 2.1 |
| hsa-cand764_st1 | 5.84 | 0.42 | 44 | 4.05E−02 | −1.08 | 2.1 |
| hsa-asg-4118_st1 | 6.78 | 0.37 | 89 | 2.79E−02 | −1.06 | 2.1 |
| hsa-asg-4836_st2 | 5.58 | 0.32 | 44 | 1.50E−02 | −1.04 | 2.1 |
| hsa-miR203_st1 | 6.10 | 0.40 | 33 | 4.47E−02 | −1.01 | 2.0 |
| hsa-miR-496 | 2.11 | 0.38 | 0 | 3.58E−02 | −1.01 | 2.0 |

SD, standard deviation;
%, percentage of samples expressing miRNA above background levels; Log2Diff,
difference in VSN-transformed expression bewteen THY and LNneg samples.

### Example 28

### miRNAs Differentally Expressed Between Normal Kidney Tissue and Normal Lymph Nodes

[0322] To identify miRNAs that may be useful markers for metastasis of cancerous kidney cells to lymph nodes, the inventors identified miRNAs that are expressed at significantly higher levels in normal kidney tissue than in cancer-negative lymph nodes.

[0323] Total RNA, purified from one normal human kidney sample (FirstChoice® Human Kidney Total RNA, cat. no. AM7976; Ambion, Austin, Tex., USA) and from nine normal human lymph node samples (FirstChoice® Human Lymph Node Total RNA, cat. no. AM7894; Ambion, Austin, Tex., USA) was purchased from Ambion. miRNA purification and labeling and microarray expression analyses were performed as described above in Example 2.

[0324] The inventors identified 173 miRNAs (75 verified, 98 predicted) with significant differential expression between the normal kidney and normal lymph node samples (log 2Diff kidney vs LN neg≧1 and p-value<0.05) (Table 27). Among the verified miRNAs, hsa-miR-429 was expressed at a level more than 200-fold higher in the kidney tissue sample; hsa-miR-200a, -187, and -204 were expressed between 50- and 100-fold higher in the kidney sample; hsa-miR-200b, -489, -184 and -215 were expressed between 20- and 50-fold higher in kidney; 16 miRNAs were expressed between 10- and 20-fold higher in kidney; and 24 miRNAs were expressed between 5- and 10-fold higher in the kidney sample than in normal lymph nodes. Among the predicted miRNAs, hsa-asg-4441_st1 expression in the kidney sample was over 50-fold higher than in the normal lymph node samples; hsa-miR-14182 st1, -14153_st2, -7637_st2 and -4915_st1 were expressed between 20- and 50-fold higher in the kidney sample; 11 miRNAs were expressed between 10- and 20-fold higher in kidney; and 28 miRNAs were expressed between 5- and 10-fold higher in the kideny sample than in the normal lymph nodes.

TABLE 27
MicroRNAs Differentially Expressed Between Normal Kidney (KID) and
Cancer-Negative Lymph Node Samples (LNneg) from Patients.

| | Probe | | LNneg | | | | | |
|---|---|---|---|---|---|---|---|---|
| MicroRNA | ID | KID | 1 | 2 | 3 | 4 | 5 | 6 |
| hsa-miR-429 | hsa-miR-429_st1 | 10.92 | 3.42 | 1.54 | 3.66 | 2.10 | 2.33 | 2.65 |
| hsa-miR-200a | hsa-miR-200a_st2 | 12.12 | 6.26 | 5.02 | 6.49 | 5.71 | 5.25 | 4.54 |
| hsa-miR-187 | hsa-miR-187_st1 | 9.50 | 4.74 | 2.75 | 2.74 | 3.75 | 3.18 | 3.32 |
| hsa-asg-4441_st1 | hsa-asg-4441_st1 | 9.93 | 3.53 | 3.42 | 4.42 | 4.56 | 4.07 | 3.32 |
| hsa-miR-204 | hsa-miR-204_st2 | 11.92 | 7.17 | 5.77 | 5.98 | 8.20 | 6.73 | 5.40 |
| hsa-miR-200b | hsa-miR-200b_st1 | 13.30 | 7.61 | 7.75 | 8.91 | 6.69 | 6.79 | 6.82 |
| hsa-asg-14182_st1 | hsa-asg-14182_st1 | 7.49 | 2.41 | 0.97 | 1.89 | 1.79 | 2.57 | 1.76 |
| hsa-asg-14153_st2 | hsa-asg-14153_st2 | 8.09 | 3.05 | 2.23 | 3.04 | 2.98 | 2.33 | 2.65 |
| hsa-miR-489 | hsa-miR-489_st2 | 11.04 | 7.34 | 6.75 | 6.01 | 7.47 | 6.33 | 5.45 |
| hsa-miR-184 | hsa-miR-184_st1 | 8.76 | 5.50 | 4.50 | 4.11 | 4.28 | 3.89 | 5.11 |
| hsa-miR-215 | hsa-miR-215_st1 | 10.15 | 6.95 | 5.77 | 5.71 | 6.66 | 5.51 | 4.79 |
| hsa-asg-7637_st2 | hsa-asg-7637_st2 | 8.23 | 3.64 | 2.50 | 4.46 | 3.44 | 3.89 | 3.97 |
| hsa-asg-4915_st1 | hsa-asg-4915_st1 | 7.33 | 2.41 | 3.78 | 2.15 | 2.57 | 3.59 | 2.87 |
| hsa-miR-493-5p | hsa-miR-493-5p_st1 | 8.91 | 4.35 | 3.78 | 6.89 | 6.18 | 6.30 | 3.63 |
| hsa-asg-11715_st2 | hsa-asg-11715_st2 | 6.14 | 1.83 | 2.32 | 2.15 | 1.48 | 2.07 | 1.76 |
| hsa-miR-424 | hsa-miR-424_st1 | 9.91 | 5.79 | 6.11 | 5.53 | 5.91 | 5.75 | 3.43 |
| hsa-asg-1088_st1 | hsa-asg-1088_st1 | 6.11 | 1.83 | 2.13 | 1.63 | 1.59 | 2.07 | 0.87 |
| hsa-miR-203 | hsa-miR-203_st2 | 10.90 | 7.32 | 5.84 | 7.22 | 8.24 | 6.42 | 5.36 |
| hsa-miR-200a* | hsa-miR-200a-_st2 | 6.80 | 3.05 | 2.83 | 2.15 | 3.89 | 2.57 | 1.76 |
| hsa-miR-194 | hsa-miR-194_st2 | 13.00 | 9.82 | 9.32 | 8.92 | 9.34 | 8.92 | 8.29 |
| hsa-miR-200c | hsa-miR-200c_st1 | 13.10 | 9.59 | 8.79 | 10.3 | 8.17 | 8.12 | 8.08 |
| hsa-asg-1260_st1 | hsa-asg-1260_st1 | 6.64 | 2.41 | 2.83 | 2.40 | 3.19 | 2.57 | 3.08 |
| hsa-miR-124a | hsa-cand79_st1 | 7.54 | 3.53 | 3.78 | 3.78 | 4.44 | 3.64 | 2.14 |
| hsa-miR-124a | hsa-miR-124a_st1 | 7.55 | 4.29 | 4.18 | 3.78 | 4.80 | 3.81 | 3.32 |
| hsa-asg-924_st1 | hsa-asg-924_st1 | 7.39 | 4.64 | 4.25 | 3.38 | 4.44 | 2.65 | 2.73 |
| hsa-asg-11443_st1 | hsa-asg-11443_st1 | 7.03 | 4.15 | 3.58 | 2.84 | 2.66 | 3.50 | 2.65 |
| hsa-miR-450 | hsa-asg-14228_st2 | 6.62 | 3.53 | 2.13 | 2.40 | 2.98 | 2.49 | 3.08 |
| hsa-miR-450 | hsa-miR-450_st2 | 7.42 | 4.22 | 2.67 | 2.84 | 3.89 | 3.59 | 3.97 |
| hsa-miR-9 | hsa-miR-9_st2 | 7.09 | 3.42 | 3.48 | 2.84 | 3.25 | 3.59 | 2.14 |
| hsa-miR-9 | hsa-cand90_st2 | 6.28 | 3.53 | 3.11 | 2.63 | 2.98 | 2.79 | 2.14 |
| hsa-asg-12227_st1 | hsa-asg-12227_st1 | 5.65 | 1.63 | 0.80 | 2.15 | 1.18 | 1.89 | 1.95 |
| hsa-miR-605 | hsa-miR-605_st1 | 6.12 | 2.58 | 2.13 | 3.04 | 0.73 | 1.71 | 2.14 |
| hsa-miR-542-5p | hsa-miR-542-5p_st2 | 7.39 | 3.91 | 2.83 | 3.66 | 3.60 | 3.81 | 2.80 |
| hsa-asg-12799_st1 | hsa-asg-12799_st1 | 7.77 | 3.53 | 5.30 | 3.30 | 2.90 | 4.20 | 5.40 |
| hsa-miR144_st2 | hsa-miR144_st2 | 6.92 | 4.59 | 4.38 | 2.63 | 3.38 | 2.65 | 2.65 |
| hsa-asg-5638_st2 | hsa-asg-5638_st2 | 6.05 | 4.00 | 2.50 | 2.15 | 2.57 | 1.62 | 2.57 |
| hsa-miR-192 | hsa-miR-192_st2 | 13.14 | 10.8 | 9.82 | 10.1 | 10.0 | 9.55 | 8.66 |
| hsa-miR-154 | hsa-miR-154_st2 | 6.91 | 3.73 | 2.50 | 4.30 | 4.35 | 4.88 | 3.08 |
| hsa-asg-14208_st1 | hsa-asg-14208_st1 | 7.03 | 5.05 | 3.48 | 4.46 | 4.14 | 3.35 | 1.21 |
| hsa-miR-411 | hsa-miR-411_st1 | 7.20 | 4.84 | 3.68 | 4.54 | 5.22 | 5.52 | 2.94 |
| hsa-miR-141 | hsa-miR-141_st1 | 7.52 | 5.05 | 3.78 | 4.93 | 4.41 | 4.36 | 2.80 |
| hsa-miR-582 | hsa-miR-582_st1 | 7.84 | 5.84 | 2.13 | 4.54 | 5.95 | 4.86 | 4.05 |
| hsa-asg-4978_st2 | hsa-asg-4978_st2 | 5.83 | 1.63 | 2.83 | 2.84 | 1.69 | 1.98 | 1.95 |
| hsa-miR-96 | hsa-miR-96_st1 | 6.55 | 4.97 | 3.36 | 3.04 | 2.98 | 4.07 | 2.80 |
| hsa-asg-4781_st2 | hsa-asg-4781_st2 | 7.15 | 4.79 | 4.11 | 4.46 | 1.69 | 2.16 | 3.43 |
| hsa-asg-5119_st1 | hsa-asg-5119_st1 | 5.79 | 2.41 | 2.67 | 1.89 | 1.90 | 1.98 | 2.49 |
| hsa-miR-135b | hsa-miR-135b_st2 | 5.85 | 1.43 | 2.67 | 2.40 | 2.82 | 2.33 | 3.08 |
| hsa-miR-135b | hsa-cand78_st1 | 5.95 | 3.42 | 2.50 | 3.66 | 4.14 | 3.68 | 2.80 |
| hsa-asg-4685_st1 | hsa-asg-4685_st1 | 7.05 | 3.31 | 4.50 | 3.52 | 3.25 | 4.36 | 3.32 |
| hsa-miR-653 | hsa-miR-653_st1 | 5.30 | 2.03 | 2.83 | 1.12 | 3.50 | 2.16 | 2.14 |
| hsa-miR-487b | hsa-miR-487b_st2 | 8.71 | 6.05 | 5.79 | 6.97 | 6.90 | 6.22 | 5.34 |
| hsa-asg-4256_st2 | hsa-asg-4256_st2 | 6.54 | 4.00 | 4.03 | 1.89 | 2.82 | 5.09 | 3.81 |
| hsa-asg-2537_st1 | hsa-asg-2537_st1 | 6.89 | 3.42 | 3.86 | 3.66 | 4.41 | 3.64 | 3.72 |
| hsa-asg-5721_st2 | hsa-asg-5721_st2 | 5.59 | 2.22 | 3.36 | 2.15 | 3.12 | 1.98 | 2.32 |
| hsa-asg-13705_st1 | hsa-asg-13705_st1 | 5.36 | 1.63 | 0.97 | 3.78 | 2.30 | 2.65 | 2.32 |
| hsa-asg-5827_st2 | hsa-asg-5827_st2 | 8.30 | 5.61 | 4.71 | 5.71 | 5.52 | 5.65 | 5.15 |
| hsa-asg-5227_st1 | hsa-asg-5227_st1 | 5.61 | 1.43 | 2.97 | 2.15 | 2.10 | 1.89 | 3.63 |
| hsa-miR-539 | hsa-miR-539_st1 | 5.57 | 2.03 | 3.11 | 2.63 | 3.38 | 2.65 | 2.94 |
| hsa-asg-11160_st2 | hsa-asg-11160_st2 | 6.26 | 2.75 | 3.11 | 3.38 | 3.05 | 2.86 | 2.65 |
| hsa-miR-501 | hsa-miR-501_st1 | 7.42 | 5.24 | 4.81 | 2.84 | 5.09 | 4.04 | 4.60 |
| hsa-asg-10247_st1 | hsa-asg-10247_st1 | 5.49 | 2.75 | 2.13 | 4.01 | 1.69 | 2.16 | 2.32 |
| hsa-asg-8174_st1 | hsa-asg-8174_st1 | 6.15 | 3.31 | 4.03 | 2.84 | 2.98 | 2.86 | 3.20 |
| hsa-asg-10131_st2 | hsa-asg-10131_st2 | 6.15 | 3.31 | 3.11 | 3.52 | 2.48 | 2.49 | 3.20 |
| hsa-miR-189 | hsa-miR-189_st1 | 8.19 | 6.07 | 5.74 | 4.93 | 7.23 | 6.15 | 4.49 |
| hsa-asg-1296_st1 | hsa-asg-1296_st1 | 6.10 | 3.05 | 2.50 | 4.81 | 2.39 | 2.49 | 2.73 |
| hsa-cand283_st1 | hsa-cand283_st1 | 7.99 | 5.44 | 6.09 | 4.68 | 5.55 | 4.71 | 5.57 |
| hsa-asg-5190_st1 | hsa-asg-5190_st1 | 5.41 | 3.73 | 2.50 | 2.15 | 2.66 | 2.72 | 3.32 |
| hsa-miR-542-3p | hsa-miR-542-3p_st1 | 8.33 | 5.09 | 5.25 | 6.01 | 6.29 | 5.71 | 5.62 |
| hsa-miR-485-3p | hsa-miR23_st2 | 6.02 | 4.29 | 2.50 | 4.11 | 3.25 | 2.41 | 3.20 |
| hsa-miR-485-3p | hsa-miR-485-3p_st2 | 5.49 | 3.64 | 2.97 | 4.30 | 4.41 | 4.24 | 3.08 |
| hsa-asg-9696_st1 | hsa-asg-9696_st1 | 9.23 | 7.42 | 6.31 | 6.68 | 7.04 | 6.23 | 6.22 |
| hsa-asg-5617_st1 | hsa-asg-5617_st1 | 5.52 | 3.73 | 3.24 | 3.90 | 3.60 | 3.40 | 2.65 |
| hsa-miR-138 | hsa-miR-138_st1 | 8.36 | 6.36 | 5.68 | 6.82 | 6.41 | 5.91 | 4.57 |
| hsa-miR-376a | hsa-asg-10049_st1 | 7.56 | 5.01 | 4.85 | 6.09 | 5.55 | 5.31 | 4.05 |
| hsa-miR-376a | hsa-miR-376a_st2 | 6.97 | 5.13 | 4.03 | 5.49 | 5.66 | 4.82 | 3.97 |
| hsa-miR-376a | hsa-asg-14234_st1 | 6.14 | 3.31 | 4.25 | 3.38 | 3.98 | 4.82 | 3.63 |
| hsa-miR-381 | hsa-miR-381_st2 | 5.77 | 2.75 | 2.32 | 4.21 | 3.38 | 4.17 | 2.94 |
| hsa-miR-19a | hsa-miR-19a_st1 | 5.47 | 4.59 | 3.36 | 2.84 | 3.12 | 3.59 | 2.49 |
| hsa-miR-410 | hsa-miR-410_st1 | 5.15 | 2.41 | 2.32 | 1.37 | 3.71 | 2.49 | 2.80 |
| hsa-miR-503 | hsa-miR-503_st1 | 9.23 | 6.88 | 7.17 | 7.38 | 6.60 | 6.08 | 6.45 |
| hsa-miR-503 | hsa-miR141_st1 | 9.18 | 7.10 | 7.28 | 7.30 | 6.52 | 6.55 | 6.62 |
| hsa-asg-6377_st2 | hsa-asg-6377_st2 | 5.27 | 2.22 | 2.83 | 3.66 | 1.90 | 1.71 | 3.43 |
| hsa-asg-12907_st2 | hsa-asg-12907_st2 | 5.27 | 3.73 | 2.83 | 3.52 | 2.48 | 2.79 | 1.95 |
| hsa-miR-499 | hsa-miR12_st1 | 7.45 | 5.44 | 4.76 | 5.37 | 6.66 | 4.07 | 4.38 |
| hsa-miR-499 | hsa-miR-499_st1 | 7.28 | 5.31 | 4.61 | 4.75 | 6.57 | 4.49 | 4.12 |
| hsa-asg-14146_st1 | hsa-asg-14146_st1 | 8.38 | 6.29 | 5.72 | 6.24 | 6.49 | 5.92 | 4.79 |
| hsa-miR-218 | hsa-miR-218_st2 | 11.33 | 9.61 | 9.22 | 8.83 | 9.68 | 9.13 | 8.59 |
| hsa-cand206_st1 | hsa-cand206_st1 | 5.21 | 2.22 | 1.94 | 3.78 | 3.60 | 2.65 | 2.14 |
| hsa-miR-660 | hsa-miR-660_st1 | 11.06 | 9.28 | 8.94 | 7.94 | 9.15 | 8.60 | 8.38 |
| hsa-miR-362 | hsa-miR-362_st1 | 9.82 | 7.42 | 7.66 | 7.94 | 7.60 | 7.44 | 7.08 |
| hsa-miR-9* | hsa-miR-9-_st2 | 8.06 | 6.19 | 6.05 | 5.57 | 6.10 | 5.37 | 5.81 |
| hsa-miR-577 | hsa-miR-577_st1 | 5.27 | 4.59 | 2.83 | 3.21 | 2.98 | 2.79 | 1.39 |
| hsa-asg-9681_st1 | hsa-asg-9681_st1 | 6.61 | 4.84 | 4.25 | 4.99 | 4.75 | 3.68 | 2.80 |
| hsa-miR-369-5p | hsa-asg-1521_st1 | 5.84 | 3.73 | 3.36 | 4.01 | 2.20 | 3.68 | 3.68 |
| hsa-miR-369-5p | hsa-miR-369-5p_st2 | 5.87 | 3.53 | 2.67 | 4.46 | 4.35 | 4.33 | 2.49 |
| hsa-asg-14230_st1 | hsa-asg-14230_st1 | 6.29 | 4.29 | 3.68 | 4.38 | 4.56 | 3.29 | 3.43 |
| hsa-asg-13908_st2 | hsa-asg-13908_st2 | 5.08 | 2.03 | 2.50 | 3.66 | 2.48 | 1.44 | 2.80 |
| hsa-asg-11361_st2 | hsa-asg-11361_st2 | 5.81 | 2.75 | 3.48 | 3.38 | 3.25 | 3.59 | 3.32 |
| hsa-miR-500 | hsa-miR-500_st1 | 10.81 | 8.74 | 8.38 | 8.78 | 8.81 | 8.16 | 7.79 |
| hsa-asg-9574_st2 | hsa-asg-9574_st2 | 8.22 | 6.61 | 6.74 | 4.46 | 5.50 | 5.60 | 6.11 |
| hsa-miR-592 | hsa-miR-592_st1 | 5.30 | 4.29 | 2.50 | 2.84 | 3.12 | 1.80 | 1.76 |
| hsa-miR102_st2 | hsa-miR102_st2 | 10.70 | 8.89 | 8.26 | 8.71 | 8.69 | 8.11 | 7.77 |
| hsa-miR-30e-5p | hsa-miR-30e-5p_st2 | 11.89 | 10.3 | 9.59 | 9.72 | 10.5 | 9.78 | 9.18 |
| hsa-asg-1268_st1 | hsa-asg-1268_st1 | 5.98 | 4.74 | 3.24 | 4.01 | 4.14 | 3.45 | 3.72 |
| hsa-asg-128_st2 | hsa-asg-128_st2 | 6.86 | 4.84 | 4.71 | 4.54 | 5.11 | 4.52 | 4.12 |
| hsa-asg-13997_st2 | hsa-asg-13997_st2 | 4.74 | 3.05 | 3.24 | 2.15 | 2.98 | 2.16 | 2.32 |
| hsa-asg-548_st1 | hsa-asg-548_st1 | 5.27 | 3.05 | 1.94 | 3.52 | 3.50 | 2.79 | 1.95 |
| hsa-asg-12552_st1 | hsa-asg-12552_st1 | 6.45 | 4.07 | 3.78 | 3.52 | 4.44 | 3.40 | 4.15 |
| hsa-asg-11612_st1 | hsa-asg-11612_st1 | 7.28 | 5.17 | 4.96 | 4.71 | 5.67 | 4.54 | 4.65 |
| hsa-asg-11338_st2 | hsa-asg-11338_st2 | 6.54 | 4.07 | 5.59 | 3.52 | 4.28 | 4.36 | 4.92 |
| hsa-asg-6642_st2 | hsa-asg-6642_st2 | 5.76 | 4.00 | 3.78 | 4.38 | 3.85 | 3.68 | 3.48 |
| hsa-asg-1221_st2 | hsa-asg-1221_st2 | 5.64 | 4.00 | 3.24 | 4.38 | 4.21 | 3.73 | 3.08 |
| hsa-asg-7471_st1 | hsa-asg-7471_st1 | 7.75 | 5.58 | 5.67 | 5.68 | 6.74 | 5.67 | 5.25 |
| hsa-miR-154* | hsa-miR-154-_st2 | 6.39 | 5.81 | 3.48 | 4.21 | 4.98 | 4.59 | 3.89 |
| hsa-asg-1596_st2 | hsa-asg-1596_st2 | 6.27 | 4.41 | 5.06 | 4.01 | 3.19 | 4.36 | 4.12 |
| hsa-miR-183 | hsa-miR-183_st1 | 9.03 | 7.65 | 6.71 | 6.71 | 7.93 | 7.54 | 5.78 |
| hsa-miR-148b | hsa-miR-148b_st2 | 11.21 | 10.0 | 8.74 | 9.45 | 10.0 | 9.60 | 8.22 |
| hsa-asg-9526_st2 | hsa-asg-9526_st2 | 7.96 | 5.37 | 6.31 | 4.68 | 5.00 | 6.41 | 6.22 |
| hsa-miR-455 | hsa-miR-455_st1 | 7.22 | 5.81 | 4.11 | 5.81 | 6.00 | 5.67 | 4.70 |
| hsa-asg-6381_st1 | hsa-asg-6381_st1 | 5.83 | 4.22 | 4.85 | 2.40 | 3.98 | 3.64 | 4.25 |
| hsa-asg-9687_st1 | hsa-asg-9687_st1 | 6.11 | 4.74 | 4.76 | 3.90 | 4.65 | 3.85 | 4.19 |
| hsa-asg-8731_st2 | hsa-asg-8731_st2 | 6.40 | 3.91 | 4.85 | 4.30 | 4.02 | 4.80 | 4.25 |
| hsa-asg-5986_st1 | hsa-asg-5986_st1 | 9.11 | 6.99 | 7.15 | 6.21 | 7.52 | 6.14 | 6.77 |
| hsa-miR-363 | hsa-miR-363_st2 | 11.72 | 10.5 | 9.97 | 9.91 | 10.2 | 9.02 | 9.35 |
| hsa-asg-4608_st1 | hsa-asg-4608_st1 | 6.31 | 3.42 | 4.85 | 4.93 | 4.38 | 4.00 | 4.57 |
| hsa-miR-487a | hsa-asg-6915_st1 | 5.57 | 4.07 | 3.58 | 3.90 | 3.38 | 3.85 | 3.72 |
| hsa-asg-4637_st1 | hsa-asg-4637_st1 | 8.26 | 7.08 | 6.44 | 6.38 | 6.52 | 6.47 | 6.47 |
| hsa-miR-494 | hsa-miR-494_st1 | 8.52 | 6.39 | 7.25 | 7.23 | 6.95 | 6.60 | 7.61 |
| hsa-miR-494 | hsa-miR61_st2 | 7.84 | 6.81 | 6.50 | 6.86 | 6.42 | 6.35 | 7.05 |
| hsa-miR-324-5p | hsa-miR-324-5p_st1 | 9.75 | 7.91 | 8.08 | 8.34 | 8.26 | 7.77 | 7.37 |
| hsa-asg-12666_st2 | hsa-asg-12666_st2 | 6.62 | 6.07 | 4.61 | 4.87 | 4.89 | 4.62 | 4.54 |
| hsa-miR-19b | hsa-miR-19b_st2 | 9.26 | 8.37 | 8.28 | 7.32 | 8.02 | 8.01 | 6.45 |
| hsa-asg-13279_st1 | hsa-asg-13279_st1 | 9.03 | 7.57 | 7.42 | 7.55 | 8.17 | 7.21 | 6.54 |
| hsa-asg-10775_st2 | hsa-asg-10775_st2 | 6.54 | 5.09 | 4.71 | 4.81 | 5.05 | 4.33 | 4.62 |
| hsa-asg-10626_st2 | hsa-asg-10626_st2 | 6.62 | 5.13 | 5.14 | 4.61 | 5.36 | 4.96 | 4.25 |
| hsa-asg-12825_st1 | hsa-asg-12825_st1 | 5.30 | 3.05 | 3.11 | 2.40 | 4.48 | 3.73 | 4.49 |
| hsa-asg-3998_st1 | hsa-asg-3998_st1 | 10.48 | 8.62 | 8.53 | 8.70 | 9.41 | 8.74 | 8.32 |
| hsa-miR-510 | hsa-miR-510_st2 | 6.54 | 5.27 | 5.02 | 4.75 | 4.65 | 4.71 | 5.04 |
| hsa-asg-9053_st1 | hsa-asg-9053_st1 | 7.55 | 5.86 | 6.50 | 4.78 | 6.21 | 6.07 | 6.86 |
| hsa-miR-518c* | hsa-miR-518c-_st2 | 5.66 | 3.83 | 5.14 | 4.38 | 3.12 | 3.35 | 4.38 |
| hsa-asg-3503_st2 | hsa-asg-3503_st2 | 5.30 | 3.31 | 3.68 | 3.38 | 3.12 | 3.97 | 3.32 |
| hsa-miR-130a | hsa-miR-130a_st1 | 11.72 | 10.3 | 9.91 | 9.72 | 10.9 | 10.7 | 9.16 |
| hsa-miR-130a | hsa-cand144_st1 | 11.72 | 10.4 | 9.80 | 9.72 | 10.9 | 10.7 | 9.20 |
| hsa-asg-10336_st1 | hsa-asg-10336_st1 | 5.74 | 4.74 | 3.95 | 3.52 | 4.32 | 4.59 | 3.77 |
| hsa-asg-2237_st1 | hsa-asg-2237_st1 | 5.99 | 4.93 | 4.66 | 3.90 | 4.82 | 4.24 | 3.89 |
| hsa-asg-3046_st2 | hsa-asg-3046_st2 | 7.22 | 5.13 | 6.50 | 4.93 | 5.84 | 5.09 | 6.22 |
| hsa-miR-329 | hsa-asg-13204_st2 | 5.18 | 4.07 | 2.83 | 4.21 | 3.38 | 4.20 | 3.43 |
| hsa-asg-13298_st1 | hsa-asg-13298_st1 | 7.32 | 5.17 | 6.20 | 4.87 | 5.96 | 5.40 | 6.18 |
| hsa-asg-3289_st1 | hsa-asg-3289_st1 | 5.08 | 3.64 | 4.25 | 3.21 | 3.89 | 3.06 | 3.81 |
| hsa-asg-12922_st1 | hsa-asg-12922_st1 | 6.01 | 4.47 | 4.55 | 3.21 | 4.56 | 4.52 | 4.88 |
| hsa-asg-4416_st1 | hsa-asg-4416_st1 | 5.15 | 3.64 | 4.03 | 4.11 | 4.06 | 3.50 | 3.72 |
| hsa-asg-10830_st2 | hsa-asg-10830_st2 | 5.44 | 4.35 | 3.95 | 3.66 | 3.89 | 3.89 | 4.43 |
| hsa-asg-1301_st1 | hsa-asg-1301_st1 | 5.33 | 4.47 | 3.68 | 3.90 | 3.71 | 3.77 | 3.63 |
| hsa-asg-10298_st1 | hsa-asg-10298_st1 | 5.61 | 4.53 | 3.78 | 4.38 | 4.21 | 3.93 | 3.97 |
| hsa-miR-422a | hsa-miR-422a_st1 | 10.74 | 9.09 | 8.97 | 9.17 | 9.80 | 8.95 | 8.80 |
| hsa-asg-14051_st2 | hsa-asg-14051_st2 | 8.08 | 6.09 | 7.27 | 5.94 | 5.91 | 6.88 | 7.07 |
| hsa-miR257_st1 | hsa-miR257_st1 | 10.31 | 9.61 | 9.05 | 9.23 | 9.55 | 8.84 | 8.49 |
| hsa-miR-106b | hsa-miR-106b_st2 | 10.95 | 9.90 | 9.59 | 10.0 | 10.0 | 9.40 | 8.12 |
| hsa-miR-210 | hsa-miR-210_st1 | 8.07 | 6.50 | 5.60 | 6.85 | 7.08 | 7.08 | 6.66 |
| hsa-asg-7278_st1 | hsa-asg-7278_st1 | 6.50 | 5.20 | 5.73 | 4.34 | 4.92 | 5.28 | 5.54 |
| hsa-asg-8512_st2 | hsa-asg-8512_st2 | 5.47 | 4.41 | 4.44 | 3.21 | 4.21 | 4.04 | 3.63 |
| hsa-miR-422b | hsa-miR-422b_st2 | 12.15 | 10.6 | 10.5 | 10.7 | 11.3 | 10.6 | 10.3 |
| hsa-miR-181a* | hsa-miR-213_st1 | 7.24 | 6.29 | 6.17 | 5.68 | 5.71 | 5.42 | 5.37 |
| hsa-miR-379 | hsa-miR-379_st1 | 8.00 | 6.51 | 6.37 | 7.12 | 6.96 | 7.01 | 6.54 |
| hsa-miR-30a-5p | hsa-miR-30a-5p_st2 | 13.26 | 12.2 | 12.0 | 11.9 | 12.5 | 12.0 | 11.6 |
| hsa-miR-370 | hsa-miR-370_st1 | 6.20 | 4.64 | 5.23 | 4.71 | 5.05 | 4.69 | 5.34 |
| hsa-asg-8160_st2 | hsa-asg-8160_st2 | 8.43 | 6.86 | 7.61 | 6.38 | 6.98 | 7.48 | 7.48 |
| hsa-asg-13135_st1 | hsa-asg-13135_st1 | 6.42 | 5.61 | 5.61 | 5.24 | 4.89 | 4.76 | 4.70 |
| hsa-miR-151 | hsa-miR-151_st2 | 10.65 | 10.1 | 9.71 | 9.15 | 9.80 | 9.35 | 9.42 |
| hsa-miR-98 | hsa-miR-98_st1 | 12.28 | 11.5 | 11.0 | 11.1 | 11.5 | 11.0 | 10.8 |
| hsa-asg-4693_st1 | hsa-asg-4693_st1 | 6.43 | 5.05 | 5.74 | 4.21 | 5.38 | 5.00 | 5.21 |
| hsa-asg-9629_st2 | hsa-asg-9629_st2 | 6.05 | 4.93 | 5.35 | 4.21 | 4.51 | 5.11 | 4.96 |
| hsa-asg-2592_st1 | hsa-asg-2592_st1 | 7.76 | 6.50 | 7.12 | 5.55 | 6.41 | 6.78 | 6.72 |
| hsa-asg-225_st1 | hsa-asg-225_st1 | 6.83 | 5.64 | 6.52 | 5.12 | 5.75 | 5.48 | 5.79 |
| hsa-asg-2402_st1 | hsa-asg-2402_st1 | 5.15 | 4.41 | 3.95 | 3.38 | 3.80 | 3.29 | 4.05 |
| hsa-miR-421 | hsa-asg-5033_st2 | 9.40 | 8.21 | 8.07 | 8.49 | 8.61 | 7.77 | 7.98 |
| hsa-miR-421 | hsa-miR-421-3p_st1 | 10.08 | 9.49 | 9.15 | 8.99 | 9.42 | 8.68 | 8.78 |
| hsa-asg-7131_st1 | hsa-asg-7131_st1 | 8.11 | 6.24 | 7.21 | 6.71 | 7.29 | 6.60 | 7.16 |
| hsa-miR-30d | hsa-miR-30d_st1 | 13.49 | 12.7 | 12.1 | 12.5 | 12.9 | 12.4 | 11.7 |
| hsa-miR-454-3p | hsa-asg-11541_st2 | 9.22 | 8.62 | 8.26 | 8.54 | 8.45 | 7.84 | 7.87 |
| hsa-asg-12697_st1 | hsa-asg-12697_st1 | 5.05 | 3.31 | 4.31 | 4.01 | 3.60 | 3.85 | 4.38 |
| hsa-asg-3156_st1 | hsa-asg-3156_st1 | 6.03 | 4.93 | 5.53 | 4.61 | 4.73 | 4.96 | 4.49 |
| hsa-asg-10007_st1 | hsa-asg-10007_st1 | 8.47 | 7.15 | 7.80 | 6.62 | 7.01 | 7.45 | 7.60 |
| hsa-asg-14233_st1 | hsa-asg-14233_st1 | 10.35 | 9.44 | 9.21 | 9.23 | 10.1 | 9.41 | 8.84 |
| hsa-asg-5385_st2 | hsa-asg-5385_st2 | 6.88 | 5.79 | 6.49 | 5.59 | 5.50 | 5.73 | 6.35 |
| hsa-asg-7713_st2 | hsa-asg-7713_st2 | 5.88 | 4.53 | 4.90 | 4.30 | 4.73 | 5.11 | 4.70 |

| | LNneg | | | | | | | | |
|---|---|---|---|---|---|---|---|---|---|
| MicroRNA | 7 | 8 | 9 | M | SD | % | ttest | log2Diff | Fold |
| hsa-miR-429 | 2.31 | 2.41 | 5.36 | 2.86 | 1.14 | 0 | 1.51E−04 | 8.06 | 266. |
| hsa-miR-200a | 4.05 | 4.75 | 7.76 | 5.54 | 1.15 | 67 | 6.21E−04 | 6.58 | 95.5 |
| hsa-miR-187 | 3.03 | 3.35 | 3.14 | 3.33 | 0.61 | 0 | 1.21E−05 | 6.16 | 71.7 |
| hsa-asg-4441_st1 | 3.98 | 5.55 | 4.54 | 4.16 | 0.71 | 0 | 5.56E−05 | 5.77 | 54.6 |
| hsa-miR-204 | 5.17 | 5.40 | 5.76 | 6.18 | 1.00 | 44 | 6.07E−04 | 5.74 | 53.5 |
| hsa-miR-200b | 6.50 | 7.64 | 10.41 | 7.68 | 1.27 | 100 | 2.97E−03 | 5.63 | 49.4 |
| hsa-asg-14182_st1 | 2.77 | 1.85 | 0.73 | 1.86 | 0.68 | 0 | 5.06E−05 | 5.63 | 49.4 |
| hsa-asg-14153_st2 | 1.17 | 2.74 | 4.37 | 2.73 | 0.85 | 0 | 3.32E−04 | 5.37 | 41.2 |
| hsa-miR-489 | 5.71 | 5.40 | 5.20 | 6.18 | 0.84 | 56 | 6.08E−04 | 4.85 | 28.9 |
| hsa-miR-184 | 1.60 | 3.80 | 4.13 | 4.10 | 1.09 | 11 | 3.69E−03 | 4.66 | 25.3 |
| hsa-miR-215 | 5.49 | 5.09 | 5.20 | 5.69 | 0.71 | 33 | 3.29E−04 | 4.47 | 22.1 |
| hsa-asg-7637_st2 | 3.27 | 3.61 | 5.24 | 3.78 | 0.77 | 0 | 5.77E−04 | 4.45 | 21.9 |
| hsa-asg-4915_st1 | 2.77 | 2.05 | 4.44 | 2.96 | 0.81 | 0 | 9.06E−04 | 4.37 | 20.7 |
| hsa-miR-493-5p | 4.36 | 1.85 | 4.58 | 4.66 | 1.58 | 33 | 3.37E−02 | 4.25 | 19.0 |
| hsa-asg-11715_st2 | 0.63 | 1.46 | 3.36 | 1.90 | 0.74 | 0 | 6.26E−04 | 4.24 | 18.9 |
| hsa-miR-424 | 5.80 | 5.70 | 7.21 | 5.69 | 0.98 | 89 | 3.51E−03 | 4.22 | 18.7 |
| hsa-asg-1088_st1 | 3.27 | 1.46 | 2.51 | 1.93 | 0.68 | 0 | 4.06E−04 | 4.19 | 18.2 |
| hsa-miR-203 | 5.17 | 6.05 | 9.34 | 6.77 | 1.38 | 78 | 2.22E−02 | 4.13 | 17.5 |
| hsa-miR-200a* | 2.14 | 3.17 | 2.89 | 2.72 | 0.64 | 0 | 3.20E−04 | 4.08 | 16.9 |
| hsa-miR-194 | 8.54 | 8.20 | 9.03 | 8.93 | 0.53 | 100 | 8.38E−05 | 4.07 | 16.8 |
| hsa-miR-200c | 7.96 | 8.87 | 11.51 | 9.05 | 1.21 | 100 | 1.33E−02 | 4.05 | 16.6 |
| hsa-asg-1260_st1 | 2.90 | 2.41 | 1.60 | 2.60 | 0.48 | 0 | 4.42E−05 | 4.04 | 16.4 |
| hsa-miR-124a | 2.31 | 3.40 | 4.82 | 3.54 | 0.87 | 0 | 2.42E−03 | 4.01 | 16.1 |
| hsa-miR-124a | 2.14 | 3.61 | 4.37 | 3.81 | 0.77 | 0 | 1.75E−03 | 3.74 | 13.3 |
| hsa-asg-924_st1 | 2.14 | 2.74 | 3.50 | 3.38 | 0.89 | 0 | 2.83E−03 | 4.00 | 16.0 |
| hsa-asg-11443_st1 | 3.38 | 2.74 | 2.29 | 3.09 | 0.59 | 0 | 2.31E−04 | 3.94 | 15.3 |
| hsa-miR-450 | 2.90 | 2.89 | 2.71 | 2.79 | 0.42 | 0 | 2.28E−05 | 3.83 | 14.2 |
| hsa-miR-450 | 4.18 | 4.44 | 4.04 | 3.76 | 0.62 | 0 | 5.02E−04 | 3.66 | 12.6 |
| hsa-miR-9 | 3.48 | 3.29 | 4.13 | 3.29 | 0.55 | 0 | 1.76E−04 | 3.79 | 13.9 |
| hsa-miR-9 | 2.62 | 1.66 | 3.62 | 2.79 | 0.63 | 0 | 7.40E−04 | 3.49 | 11.2 |
| hsa-asg-12227_st1 | 2.77 | 2.58 | 2.71 | 1.96 | 0.68 | 0 | 8.81E−04 | 3.68 | 12.9 |
| hsa-miR-605 | 2.90 | 3.03 | 4.44 | 2.52 | 1.03 | 0 | 1.07E−02 | 3.60 | 12.1 |
| hsa-miR-542-5p | 3.83 | 4.66 | 5.16 | 3.81 | 0.76 | 0 | 2.04E−03 | 3.58 | 12.0 |
| hsa-asg-12799_st1 | 3.91 | 4.29 | 4.84 | 4.19 | 0.87 | 0 | 4.61E−03 | 3.58 | 12.0 |
| hsa-miR144_st2 | 2.77 | 3.17 | 4.21 | 3.38 | 0.81 | 0 | 3.11E−03 | 3.54 | 11.7 |
| hsa-asg-5638_st2 | 1.25 | 2.74 | 3.22 | 2.51 | 0.81 | 0 | 3.31E−03 | 3.53 | 11.6 |
| hsa-miR-192 | 9.31 | 8.79 | 9.63 | 9.64 | 0.67 | 100 | 1.13E−03 | 3.50 | 11.3 |
| hsa-miR-154 | 3.15 | 1.28 | 3.94 | 3.47 | 1.10 | 0 | 1.83E−02 | 3.44 | 10.8 |
| hsa-asg-14208_st1 | 3.03 | 4.04 | 3.94 | 3.63 | 1.09 | 0 | 1.85E−02 | 3.40 | 10.6 |
| hsa-miR-411 | 3.38 | 2.23 | 2.07 | 3.83 | 1.27 | 11 | 3.62E−02 | 3.37 | 10.4 |
| hsa-miR-141 | 3.83 | 3.80 | 4.51 | 4.16 | 0.69 | 0 | 1.76E−03 | 3.36 | 10.3 |
| hsa-miR-582 | 4.05 | 4.32 | 4.64 | 4.49 | 1.12 | 22 | 2.21E−02 | 3.35 | 10.2 |
| hsa-asg-4978_st2 | 2.77 | 2.58 | 4.13 | 2.49 | 0.79 | 0 | 3.76E−03 | 3.34 | 10.1 |
| hsa-miR-96 | 3.03 | 1.85 | 3.06 | 3.24 | 0.87 | 11 | 6.76E−03 | 3.31 | 9.9 |
| hsa-asg-4781_st2 | 5.36 | 5.46 | 3.22 | 3.85 | 1.34 | 11 | 4.72E−02 | 3.30 | 9.9 |
| hsa-asg-5119_st1 | 2.90 | 2.58 | 3.62 | 2.49 | 0.55 | 0 | 4.88E−04 | 3.30 | 9.8 |
| hsa-miR-135b | 3.27 | 2.23 | 2.89 | 2.57 | 0.55 | 0 | 4.80E−04 | 3.28 | 9.7 |
| hsa-miR-135b | 3.57 | 1.66 | 3.22 | 3.18 | 0.75 | 0 | 8.32E−03 | 2.76 | 6.8 |
| hsa-asg-4685_st1 | 3.03 | 4.32 | 4.76 | 3.82 | 0.65 | 0 | 1.55E−03 | 3.23 | 9.4 |
| hsa-miR-653 | 2.47 | 1.66 | 1.14 | 2.11 | 0.77 | 0 | 4.29E−03 | 3.19 | 9.1 |
| hsa-miR-487b | 4.88 | 3.71 | 4.37 | 5.58 | 1.11 | 67 | 2.81E−02 | 3.13 | 8.8 |
| hsa-asg-4256_st2 | 3.98 | 1.28 | 3.84 | 3.42 | 1.19 | 0 | 3.82E−02 | 3.12 | 8.7 |
| hsa-asg-2537_st1 | 3.38 | 3.71 | 4.13 | 3.77 | 0.33 | 0 | 1.84E−05 | 3.12 | 8.7 |
| hsa-asg-5721_st2 | 1.78 | 2.89 | 2.51 | 2.48 | 0.54 | 0 | 5.74E−04 | 3.11 | 8.6 |
| hsa-asg-13705_st1 | 0.37 | 3.17 | 3.22 | 2.27 | 1.11 | 0 | 2.95E−02 | 3.09 | 8.5 |
| hsa-asg-5827_st2 | 4.76 | 5.16 | 4.70 | 5.22 | 0.42 | 22 | 1.18E−04 | 3.08 | 8.5 |
| hsa-asg-5227_st1 | 2.90 | 3.40 | 2.51 | 2.56 | 0.73 | 0 | 4.08E−03 | 3.06 | 8.3 |
| hsa-miR-539 | 1.96 | 2.58 | 1.36 | 2.52 | 0.63 | 0 | 1.81E−03 | 3.05 | 8.3 |
| hsa-asg-11160_st2 | 2.47 | 3.51 | 5.11 | 3.21 | 0.79 | 0 | 6.37E−03 | 3.05 | 8.3 |
| hsa-miR-501 | 4.47 | 4.25 | 4.37 | 4.41 | 0.70 | 0 | 3.64E−03 | 3.01 | 8.0 |
| hsa-asg-10247_st1 | 0.37 | 3.17 | 3.94 | 2.50 | 1.14 | 0 | 3.73E−02 | 2.99 | 7.9 |
| hsa-asg-8174_st1 | 2.77 | 2.74 | 4.13 | 3.21 | 0.53 | 0 | 7.47E−04 | 2.95 | 7.7 |
| hsa-asg-10131_st2 | 2.62 | 3.17 | 5.07 | 3.22 | 0.79 | 0 | 7.67E−03 | 2.93 | 7.6 |
| hsa-miR-189 | 4.92 | 3.51 | 4.92 | 5.33 | 1.09 | 44 | 3.74E−02 | 2.86 | 7.3 |
| hsa-asg-1296_st1 | 3.15 | 3.88 | 4.13 | 3.24 | 0.85 | 0 | 1.29E−02 | 2.86 | 7.3 |
| hsa-cand283_st1 | 5.24 | 4.55 | 4.51 | 5.15 | 0.56 | 33 | 1.31E−03 | 2.84 | 7.2 |
| hsa-asg-5190_st1 | 1.78 | 2.23 | 2.51 | 2.62 | 0.60 | 0 | 2.17E−03 | 2.79 | 6.9 |
| hsa-miR-542-3p | 5.38 | 5.88 | 4.70 | 5.55 | 0.49 | 78 | 6.91E−04 | 2.78 | 6.9 |
| hsa-miR-485-3p | 3.57 | 2.74 | 3.06 | 3.24 | 0.66 | 0 | 3.96E−03 | 2.78 | 6.9 |
| hsa-miR-485-3p | 3.66 | 3.51 | 3.84 | 3.74 | 0.51 | 0 | 1.20E−02 | 1.75 | 3.4 |
| hsa-asg-9696_st1 | 6.61 | 6.53 | 5.07 | 6.46 | 0.65 | 89 | 3.81E−03 | 2.77 | 6.8 |
| hsa-asg-5617_st1 | 1.42 | 1.46 | 1.60 | 2.78 | 1.03 | 0 | 3.53E−02 | 2.74 | 6.7 |
| hsa-miR-138 | 4.92 | 4.87 | 5.09 | 5.62 | 0.80 | 33 | 1.18E−02 | 2.73 | 6.7 |
| hsa-miR-376a | 3.83 | 4.12 | 4.64 | 4.83 | 0.75 | 11 | 8.79E−03 | 2.73 | 6.6 |
| hsa-miR-376a | 2.47 | 3.80 | 3.73 | 4.34 | 1.02 | 0 | 4.04E−02 | 2.63 | 6.2 |
| hsa-miR-376a | 2.90 | 4.04 | 1.83 | 3.57 | 0.86 | 0 | 2.26E−02 | 2.57 | 5.9 |
| hsa-miR-381 | 3.48 | 1.28 | 3.22 | 3.08 | 0.91 | 0 | 2.37E−02 | 2.69 | 6.4 |
| hsa-miR-19a | 1.60 | 1.28 | 2.51 | 2.82 | 1.01 | 0 | 3.81E−02 | 2.64 | 6.3 |
| hsa-miR-410 | 3.15 | 1.85 | 2.51 | 2.51 | 0.68 | 0 | 6.32E−03 | 2.64 | 6.2 |
| hsa-miR-503 | 6.39 | 6.60 | 5.99 | 6.62 | 0.46 | 78 | 6.90E−04 | 2.62 | 6.1 |
| hsa-miR-503 | 6.85 | 6.87 | 6.74 | 6.87 | 0.30 | 100 | 8.33E−05 | 2.31 | 5.0 |
| hsa-asg-6377_st2 | 2.77 | 2.41 | 3.06 | 2.67 | 0.66 | 0 | 5.85E−03 | 2.61 | 6.1 |
| hsa-asg-12907_st2 | 2.77 | 1.66 | 2.51 | 2.69 | 0.66 | 0 | 6.08E−03 | 2.58 | 6.0 |
| hsa-miR-499 | 4.80 | 4.55 | 3.84 | 4.87 | 0.85 | 22 | 2.10E−02 | 2.58 | 6.0 |
| hsa-miR-499 | 5.03 | 4.25 | 4.58 | 4.86 | 0.74 | 22 | 1.46E−02 | 2.42 | 5.3 |
| hsa-asg-14146_st1 | 5.78 | 4.66 | 6.46 | 5.82 | 0.68 | 78 | 7.10E−03 | 2.57 | 5.9 |
| hsa-miR-218 | 7.75 | 7.43 | 8.74 | 8.77 | 0.77 | 100 | 1.35E−02 | 2.56 | 5.9 |
| hsa-cand206_st1 | 3.57 | 1.28 | 2.71 | 2.65 | 0.86 | 0 | 2.23E−02 | 2.56 | 5.9 |
| hsa-miR-660 | 7.78 | 7.90 | 8.59 | 8.51 | 0.55 | 100 | 2.38E−03 | 2.55 | 5.9 |
| hsa-miR-362 | 6.93 | 6.55 | 7.04 | 7.30 | 0.43 | 100 | 5.28E−04 | 2.52 | 5.7 |
| hsa-miR-9* | 4.92 | 4.71 | 5.20 | 5.55 | 0.53 | 44 | 2.12E−03 | 2.51 | 5.7 |
| hsa-miR-577 | 1.96 | 2.05 | 3.22 | 2.78 | 0.92 | 0 | 3.37E−02 | 2.49 | 5.6 |
| hsa-asg-9681_st1 | 4.05 | 3.29 | 4.51 | 4.13 | 0.75 | 0 | 1.35E−02 | 2.48 | 5.6 |
| hsa-miR-369-5p | 3.38 | 2.74 | 3.50 | 3.36 | 0.56 | 0 | 3.05E−03 | 2.48 | 5.6 |
| hsa-miR-369-5p | 2.90 | 2.58 | 3.50 | 3.42 | 0.81 | 0 | 2.04E−02 | 2.45 | 5.5 |
| hsa-asg-14230_st1 | 2.77 | 3.93 | 4.04 | 3.82 | 0.58 | 0 | 3.81E−03 | 2.47 | 5.5 |
| hsa-asg-13908_st2 | 2.62 | 2.41 | 3.73 | 2.63 | 0.72 | 0 | 1.22E−02 | 2.45 | 5.5 |
| hsa-asg-11361_st2 | 3.83 | 2.58 | 4.29 | 3.39 | 0.52 | 0 | 2.16E−03 | 2.42 | 5.4 |
| hsa-miR-500 | 8.11 | 8.41 | 8.49 | 8.41 | 0.35 | 100 | 1.69E−04 | 2.40 | 5.3 |
| hsa-asg-9574_st2 | 5.03 | 6.54 | 6.00 | 5.84 | 0.77 | 44 | 1.87E−02 | 2.38 | 5.2 |
| hsa-miR-592 | 3.03 | 2.58 | 4.51 | 2.94 | 0.96 | 0 | 4.73E−02 | 2.36 | 5.1 |
| hsa-miR102_st2 | 7.93 | 8.39 | 8.40 | 8.35 | 0.37 | 100 | 3.38E−04 | 2.35 | 5.1 |
| hsa-miR-30e-5p | 9.21 | 8.13 | 9.48 | 9.56 | 0.71 | 100 | 1.39E−02 | 2.33 | 5.0 |
| hsa-asg-1268_st1 | 3.83 | 2.23 | 3.62 | 3.67 | 0.69 | 0 | 1.29E−02 | 2.32 | 5.0 |
| hsa-asg-128_st2 | 4.96 | 4.32 | 4.13 | 4.58 | 0.35 | 0 | 2.85E−04 | 2.27 | 4.8 |
| hsa-asg-13997_st2 | 1.25 | 3.17 | 2.29 | 2.51 | 0.65 | 0 | 1.17E−02 | 2.23 | 4.7 |
| hsa-asg-548_st1 | 3.38 | 2.74 | 4.58 | 3.05 | 0.83 | 0 | 3.41E−02 | 2.22 | 4.7 |
| hsa-asg-12552_st1 | 3.83 | 4.61 | 6.27 | 4.23 | 0.86 | 11 | 4.00E−02 | 2.22 | 4.7 |
| hsa-asg-11612_st1 | 4.62 | 5.25 | 6.01 | 5.07 | 0.51 | 11 | 3.42E−03 | 2.21 | 4.6 |
| hsa-asg-11338_st2 | 3.15 | 4.12 | 5.44 | 4.38 | 0.81 | 11 | 3.60E−02 | 2.15 | 4.4 |
| hsa-asg-6642_st2 | 2.90 | 2.89 | 3.73 | 3.63 | 0.48 | 0 | 3.13E−03 | 2.12 | 4.4 |
| hsa-asg-1221_st2 | 2.62 | 2.89 | 3.50 | 3.52 | 0.61 | 0 | 1.08E−02 | 2.12 | 4.3 |
| hsa-asg-7471_st1 | 5.24 | 4.97 | 6.07 | 5.65 | 0.52 | 56 | 5.03E−03 | 2.10 | 4.3 |
| hsa-miR-154* | 4.25 | 3.17 | 4.37 | 4.31 | 0.79 | 11 | 3.65E−02 | 2.09 | 4.2 |
| hsa-asg-1596_st2 | 4.12 | 4.19 | 4.37 | 4.20 | 0.49 | 0 | 3.90E−03 | 2.07 | 4.2 |
| hsa-miR-183 | 7.50 | 6.30 | 6.63 | 6.97 | 0.72 | 89 | 2.57E−02 | 2.06 | 4.2 |
| hsa-miR-148b | 9.07 | 8.12 | 9.12 | 9.16 | 0.71 | 100 | 2.50E−02 | 2.06 | 4.2 |
| hsa-asg-9526_st2 | 5.84 | 6.65 | 6.83 | 5.92 | 0.75 | 78 | 3.34E−02 | 2.03 | 4.1 |
| hsa-miR-455 | 5.07 | 5.30 | 4.58 | 5.23 | 0.66 | 33 | 2.09E−02 | 1.99 | 4.0 |
| hsa-asg-6381_st1 | 3.27 | 3.40 | 4.64 | 3.85 | 0.76 | 0 | 3.87E−02 | 1.98 | 3.9 |
| hsa-asg-9687_st1 | 4.05 | 3.71 | 3.50 | 4.15 | 0.47 | 0 | 4.17E−03 | 1.96 | 3.9 |
| hsa-asg-8731_st2 | 3.83 | 5.36 | 4.76 | 4.45 | 0.52 | 0 | 7.29E−03 | 1.94 | 3.8 |
| hsa-asg-5986_st1 | 8.00 | 7.41 | 8.39 | 7.18 | 0.75 | 0 | 4.09E−02 | 1.93 | 3.8 |
| hsa-miR-363 | 10.0 | 9.10 | 9.93 | 9.79 | 0.53 | 100 | 8.21E−03 | 1.93 | 3.8 |
| hsa-asg-4608_st1 | 3.98 | 5.01 | 4.97 | 4.46 | 0.56 | 0 | 1.33E−02 | 1.86 | 3.6 |
| hsa-miR-487a | 3.66 | 3.71 | 3.62 | 3.72 | 0.20 | 0 | 2.40E−05 | 1.84 | 3.6 |
| hsa-asg-4637_st1 | 6.05 | 6.48 | 5.91 | 6.42 | 0.33 | 100 | 6.92E−04 | 1.84 | 3.6 |
| hsa-miR-494 | 5.71 | 5.84 | 6.58 | 6.68 | 0.64 | 100 | 2.65E−02 | 1.84 | 3.6 |
| hsa-miR-494 | 5.38 | 5.77 | 6.87 | 6.45 | 0.55 | 89 | 4.40E−02 | 1.39 | 2.6 |
| hsa-miR-324-5p | 7.80 | 7.85 | 7.97 | 7.93 | 0.29 | 100 | 3.15E−04 | 1.83 | 3.5 |
| hsa-asg-12666_st2 | 4.80 | 3.97 | 4.82 | 4.80 | 0.55 | 11 | 1.43E−02 | 1.82 | 3.5 |
| hsa-miR-19b | 6.90 | 6.51 | 7.18 | 7.45 | 0.74 | 100 | 4.98E−02 | 1.81 | 3.5 |
| hsa-asg-13279_st1 | 6.86 | 6.98 | 6.66 | 7.22 | 0.52 | 100 | 1.06E−02 | 1.81 | 3.5 |
| hsa-asg-10775_st2 | 4.80 | 4.50 | 4.70 | 4.73 | 0.24 | 0 | 1.06E−04 | 1.81 | 3.5 |
| hsa-asg-10626_st2 | 4.84 | 4.25 | 4.97 | 4.84 | 0.39 | 0 | 2.48E−03 | 1.78 | 3.4 |
| hsa-asg-12825_st1 | 3.75 | 3.71 | 3.06 | 3.53 | 0.69 | 0 | 4.15E−02 | 1.77 | 3.4 |
| hsa-asg-3998_st1 | 9.20 | 8.74 | 8.47 | 8.75 | 0.35 | 100 | 1.48E−03 | 1.74 | 3.3 |
| hsa-miR-510 | 4.52 | 4.25 | 5.07 | 4.81 | 0.32 | 11 | 8.75E−04 | 1.73 | 3.3 |
| hsa-asg-9053_st1 | 4.88 | 5.90 | 5.62 | 5.85 | 0.69 | 33 | 4.67E−02 | 1.70 | 3.2 |
| hsa-miR-518c* | 3.66 | 3.71 | 4.64 | 4.02 | 0.65 | 0 | 4.49E−02 | 1.64 | 3.1 |
| hsa-asg-3503_st2 | 3.15 | 4.66 | 4.44 | 3.67 | 0.57 | 0 | 2.57E−02 | 1.63 | 3.1 |
| hsa-miR-130a | 10.0 | 9.61 | 10.47 | 10.10 | 0.57 | 100 | 2.68E−02 | 1.63 | 3.1 |
| hsa-miR-130a | 9.99 | 9.54 | 10.59 | 10.11 | 0.60 | 100 | 3.45E−02 | 1.61 | 3.0 |
| hsa-asg-10336_st1 | 4.36 | 3.71 | 4.04 | 4.11 | 0.42 | 0 | 6.10E−03 | 1.63 | 3.1 |
| hsa-asg-2237_st1 | 4.12 | 4.19 | 4.70 | 4.38 | 0.40 | 0 | 4.99E−03 | 1.61 | 3.1 |
| hsa-asg-3046_st2 | 5.64 | 5.36 | 5.84 | 5.62 | 0.54 | 78 | 2.16E−02 | 1.61 | 3.0 |
| hsa-miR-329 | 3.98 | 2.58 | 3.50 | 3.58 | 0.59 | 0 | 3.35E−02 | 1.60 | 3.0 |
| hsa-asg-13298_st1 | 6.00 | 5.48 | 6.20 | 5.72 | 0.50 | 44 | 1.60E−02 | 1.60 | 3.0 |
| hsa-asg-3289_st1 | 2.47 | 3.17 | 3.94 | 3.49 | 0.56 | 0 | 2.67E−02 | 1.59 | 3.0 |
| hsa-asg-12922_st1 | 3.98 | 4.75 | 4.92 | 4.43 | 0.53 | 0 | 2.25E−02 | 1.58 | 3.0 |
| hsa-asg-4416_st1 | 3.91 | 2.89 | 2.51 | 3.60 | 0.56 | 0 | 2.94E−02 | 1.55 | 2.9 |
| hsa-asg-10830_st2 | 3.38 | 3.61 | 3.84 | 3.89 | 0.34 | 0 | 2.43E−03 | 1.55 | 2.9 |
| hsa-asg-1301_st1 | 4.18 | 3.80 | 2.89 | 3.78 | 0.43 | 0 | 9.32E−03 | 1.55 | 2.9 |
| hsa-asg-10298_st1 | 4.25 | 3.71 | 3.84 | 4.07 | 0.29 | 0 | 9.22E−04 | 1.55 | 2.9 |
| hsa-miR-422a | 9.67 | 9.22 | 9.12 | 9.20 | 0.33 | 100 | 2.23E−03 | 1.54 | 2.9 |
| hsa-asg-14051_st2 | 6.09 | 6.95 | 6.96 | 6.57 | 0.55 | 67 | 3.13E−02 | 1.51 | 2.9 |
| hsa-miR257_st1 | 8.48 | 8.13 | 7.89 | 8.81 | 0.61 | 100 | 4.66E−02 | 1.50 | 2.8 |
| hsa-miR-106b | 9.19 | 9.08 | 9.75 | 9.46 | 0.61 | 100 | 4.81E−02 | 1.50 | 2.8 |
| hsa-miR-210 | 6.09 | 6.46 | 7.00 | 6.59 | 0.50 | 89 | 2.21E−02 | 1.48 | 2.8 |
| hsa-asg-7278_st1 | 3.98 | 4.73 | 5.42 | 5.02 | 0.58 | 11 | 4.13E−02 | 1.48 | 2.8 |
| hsa-asg-8512_st2 | 3.48 | 4.32 | 4.44 | 4.02 | 0.46 | 0 | 1.85E−02 | 1.44 | 2.7 |
| hsa-miR-422b | 10.9 | 10.7 | 10.53 | 10.71 | 0.28 | 100 | 1.30E−03 | 1.44 | 2.7 |
| hsa-miR-181a* | 5.30 | 5.77 | 6.53 | 5.80 | 0.43 | 56 | 1.40E−02 | 1.43 | 2.7 |
| hsa-miR-379 | 6.33 | 6.13 | 6.20 | 6.58 | 0.37 | 100 | 6.27E−03 | 1.43 | 2.7 |
| hsa-miR-30a-5p | 11.5 | 10.8 | 11.81 | 11.85 | 0.48 | 100 | 2.33E−02 | 1.41 | 2.7 |
| hsa-miR-370 | 4.31 | 4.47 | 5.09 | 4.84 | 0.36 | 0 | 6.58E−03 | 1.37 | 2.6 |
| hsa-asg-8160_st2 | 6.27 | 7.28 | 7.63 | 7.11 | 0.52 | 100 | 4.14E−02 | 1.32 | 2.5 |
| hsa-asg-13135_st1 | 5.14 | 4.44 | 5.57 | 5.11 | 0.44 | 22 | 2.15E−02 | 1.31 | 2.5 |
| hsa-miR-151 | 9.02 | 8.50 | 9.03 | 9.35 | 0.50 | 100 | 3.93E−02 | 1.30 | 2.5 |
| hsa-miR-98 | 10.8 | 10.1 | 10.65 | 10.99 | 0.44 | 100 | 2.36E−02 | 1.29 | 2.5 |
| hsa-asg-4693_st1 | 4.52 | 5.65 | 5.54 | 5.14 | 0.51 | 11 | 4.59E−02 | 1.28 | 2.4 |
| hsa-asg-9629_st2 | 3.98 | 4.75 | 5.16 | 4.77 | 0.46 | 0 | 2.94E−02 | 1.27 | 2.4 |
| hsa-asg-2592_st1 | 6.42 | 6.43 | 6.57 | 6.50 | 0.42 | 89 | 2.22E−02 | 1.26 | 2.4 |
| hsa-asg-225_st1 | 4.84 | 5.76 | 5.22 | 5.57 | 0.48 | 22 | 3.94E−02 | 1.26 | 2.4 |
| hsa-asg-2402_st1 | 4.80 | 3.97 | 3.73 | 3.93 | 0.47 | 0 | 4.01E−02 | 1.22 | 2.3 |
| hsa-miR-421 | 7.76 | 8.76 | 8.05 | 8.19 | 0.36 | 100 | 1.29E−02 | 1.21 | 2.3 |
| hsa-miR-421 | 8.36 | 9.37 | 8.90 | 9.02 | 0.38 | 100 | 2.86E−02 | 1.06 | 2.1 |
| hsa-asg-7131_st1 | 6.28 | 7.49 | 7.39 | 6.93 | 0.48 | 33 | 4.85E−02 | 1.18 | 2.3 |
| hsa-miR-30d | 12.0 | 11.6 | 12.52 | 12.32 | 0.44 | 100 | 3.62E−02 | 1.17 | 2.3 |
| hsa-miR-454-3p | 7.89 | 7.31 | 7.80 | 8.06 | 0.43 | 100 | 3.45E−02 | 1.15 | 2.2 |
| hsa-asg-12697_st1 | 3.75 | 4.04 | 4.04 | 3.92 | 0.34 | 0 | 1.32E−02 | 1.13 | 2.2 |
| hsa-asg-3156_st1 | 4.42 | 5.23 | 5.24 | 4.90 | 0.38 | 11 | 2.25E−02 | 1.12 | 2.2 |
| hsa-asg-10007_st1 | 6.98 | 7.78 | 7.69 | 7.34 | 0.42 | 56 | 3.44E−02 | 1.12 | 2.2 |
| hsa-asg-14233_st1 | 9.03 | 8.85 | 8.87 | 9.23 | 0.41 | 100 | 3.37E−02 | 1.12 | 2.2 |
| hsa-asg-5385_st2 | 5.20 | 5.66 | 5.86 | 5.80 | 0.40 | 33 | 3.41E−02 | 1.08 | 2.1 |
| hsa-asg-7713_st2 | 4.80 | 5.72 | 5.11 | 4.88 | 0.41 | 0 | 4.86E−02 | 1.00 | 2.0 |

SD, standard deviation;
%, percentage of samples expressing miRNA above background levels;
Log2Diff, difference in VSN-transformed expression bewteen KID and LNneg samples.

### Example 29

### miRNAs Differentally Expressed Between Normal Stomach Tissue and Normal Lymph Nodes

[0325] To identify miRNAs that may be useful markers for metastasis of cancerous stomach cells to lymph nodes, the inventors identified miRNAs that are expressed at significantly higher levels in normal stomach tissue than in cancer-negative lymph nodes.

[0326] Total RNA, purified from one normal human stomach sample (FirstChoice® Human Stomach Total RNA, cat. no. AM7996; Ambion, Austin, Tex., USA) and from nine normal human lymph node samples (FirstChoice® Human Lymph Node Total RNA, cat. no. AM7894; Ambion, Austin, Tex., USA) was purchased from Ambion. miRNA purification and labeling and microarray expression analyses were performed as described above in Example 2.

[0327] The inventors identified 99 miRNAs (35 verified, 64 predicted) with significant differential expression between the normal stomach sample and normal lymph nodes (|log 2Diff| stomach vs LN neg≧1 and p-value<0.05) (Table 28). Among the verified miRNAs, hsa-miR-375 showed an expression level over 600-fold higher in the stomach sample; hsa-miR-429 and -200a were expressed at levels between 100- and 200-fold higher in the stomach sample; 7 miRNAs (hsa-miR-205, -200b, -203, -141, -200a*, -200c and -605) were expressed between 20- and 90-fold higher in stomach; 6 miRNAs were expressed between 10- and 20-fold higher in stomach; and 11 miRNAs were expressed between 5- and 10-fold higher in the stomach sample than in normal lymph node samples. Among the predicted miRNAs, hsa-asg-14153-st2 was expressed at a level over 100-fold higher in the stomach sample; 5 miRNAs (hsa-asg-7637_st2, -924_st1, -11715_st2, -14182_st1, and -12227_st1) were expressed between 20- and 60-fold higher in stomach; 14 miRNAs were expressed between 10- and 20-fold higher in stomach; and 21 miRNAs were expressed between 5- and 10-fold higher in the stomach sample than in normal lymph nodes.

TABLE 28
MicroRNAs Differentially Expressed Between Normal Stomach (STO) and
Cancer-Negative Lymph Node Samples (LNneg) from Patients.

| | Probe | | LNneg | | | | | |
|---|---|---|---|---|---|---|---|---|
| MicroRNA | ID | STO | 1 | 2 | 3 | 4 | 5 | 6 |
| hsa-miR-375 | hsa-miR-375_st1 | 13.69 | 5.95 | 4.88 | 6.24 | 2.82 | 2.93 | 3.63 |
| hsa-miR-429 | hsa-miR-429_st1 | 10.27 | 3.42 | 1.54 | 3.66 | 2.10 | 2.33 | 2.65 |
| hsa-miR-200a | hsa-miR-200a_st2 | 12.33 | 6.26 | 5.02 | 6.49 | 5.71 | 5.25 | 4.54 |
| hsa-asg-14153 | hsa-asg-14153_st2 | 9.50 | 3.05 | 2.23 | 3.04 | 2.98 | 2.33 | 2.65 |
| hsa-miR-205 | hsa-miR-205_st1 | 11.12 | 2.90 | 5.86 | 5.64 | 2.00 | 3.55 | 6.06 |
| hsa-miR-200b | hsa-miR-200b_st1 | 13.65 | 7.61 | 7.75 | 8.91 | 6.69 | 6.79 | 6.82 |
| hsa-asg-7637 | hsa-asg-7637_st2 | 9.67 | 3.64 | 2.50 | 4.46 | 3.44 | 3.89 | 3.97 |
| hsa-miR-203 | hsa-miR-203_st2 | 12.59 | 7.32 | 5.84 | 7.22 | 8.24 | 6.42 | 5.36 |
| hsa-miR-141 | hsa-miR-141_st1 | 9.62 | 5.05 | 3.78 | 4.93 | 4.41 | 4.36 | 2.80 |
| hsa-asg-924 | hsa-asg-924_st1 | 8.68 | 4.64 | 4.25 | 3.38 | 4.44 | 2.65 | 2.73 |
| hsa-miR-200a* | hsa-miR-200a-_st2 | 7.81 | 3.05 | 2.83 | 2.15 | 3.89 | 2.57 | 1.76 |
| hsa-miR-200c | hsa-miR-200c_st1 | 14.11 | 9.59 | 8.79 | 10.31 | 8.17 | 8.12 | 8.08 |
| hsa-asg-11715 | hsa-asg-11715_st2 | 6.69 | 1.83 | 2.32 | 2.15 | 1.48 | 2.07 | 1.76 |
| hsa-miR-605 | hsa-miR-605_st1 | 7.12 | 2.58 | 2.13 | 3.04 | 0.73 | 1.71 | 2.14 |
| hsa-asg-14182 | hsa-asg-14182_st1 | 6.35 | 2.41 | 0.97 | 1.89 | 1.79 | 2.57 | 1.76 |
| hsa-asg-12227 | hsa-asg-12227_st1 | 6.39 | 1.63 | 0.80 | 2.15 | 1.18 | 1.89 | 1.95 |
| hsa-miR-31 | hsa-miR-31_st2 | 13.42 | 10.40 | 9.74 | 8.95 | 10.15 | 8.68 | 8.54 |
| hsa-asg-2424 | hsa-asg-2424_st1 | 5.91 | 2.22 | 1.15 | 1.12 | 1.79 | 1.27 | 1.86 |
| hsa-asg-12139 | hsa-asg-12139_st2 | 6.35 | 2.75 | 2.32 | 2.63 | 2.30 | 1.62 | 2.14 |
| hsa-miR-215 | hsa-miR-215_st1 | 9.68 | 6.95 | 5.77 | 5.71 | 6.66 | 5.51 | 4.79 |
| hsa-asg-5886 | hsa-asg-5886_st2 | 6.05 | 2.22 | 2.67 | 2.63 | 1.69 | 2.65 | 1.76 |
| hsa-miR-194 | hsa-miR-194_st2 | 12.91 | 9.82 | 9.32 | 8.92 | 9.34 | 8.92 | 8.29 |
| hsa-miR-592 | hsa-miR-592_st1 | 6.84 | 4.29 | 2.50 | 2.84 | 3.12 | 1.80 | 1.76 |
| hsa-miR-592 | hsa-asg-4400_st1 | 6.42 | 3.05 | 3.24 | 3.66 | 1.69 | 1.62 | 2.65 |
| hsa-asg-10131 | hsa-asg-10131_st2 | 7.11 | 3.31 | 3.11 | 3.52 | 2.48 | 2.49 | 3.20 |
| hsa-asg-13997 | hsa-asg-13997_st2 | 6.36 | 3.05 | 3.24 | 2.15 | 2.98 | 2.16 | 2.32 |
| hsa-asg-11463 | hsa-asg-11463_st1 | 5.74 | 2.03 | 2.13 | 2.63 | 1.69 | 1.62 | 1.95 |
| hsa-asg-8428 | hsa-asg-8428_st2 | 5.63 | 2.22 | 1.94 | 2.63 | 2.00 | 2.49 | 1.03 |
| hsa-asg-5119 | hsa-asg-5119_st1 | 6.33 | 2.41 | 2.67 | 1.89 | 1.90 | 1.98 | 2.49 |
| hsa-asg-13705 | hsa-asg-13705_st1 | 6.08 | 1.63 | 0.97 | 3.78 | 2.30 | 2.65 | 2.32 |
| hsa-miR-192 | hsa-miR-192_st2 | 13.40 | 10.83 | 9.82 | 10.13 | 10.00 | 9.55 | 8.66 |
| hsa-miR-96 | hsa-miR-96_st1 | 6.97 | 4.97 | 3.36 | 3.04 | 2.98 | 4.07 | 2.80 |
| hsa-asg-9219 | hsa-asg-9219_st2 | 5.56 | 2.58 | 1.74 | 2.15 | 2.57 | 1.80 | 1.86 |
| hsa-cand317 | hsa-cand317_st1 | 5.93 | 3.42 | 2.67 | 1.63 | 3.12 | 1.10 | 1.57 |
| hsa-asg-4219 | hsa-asg-4219_st1 | 5.92 | 3.42 | 1.74 | 1.63 | 1.48 | 2.24 | 1.76 |
| hsa-asg-3979 | hsa-asg-3979_st1 | 5.53 | 2.41 | 2.83 | 2.84 | 2.30 | 2.16 | 2.65 |
| hsa-asg-4978 | hsa-asg-4978_st2 | 5.83 | 1.63 | 2.83 | 2.84 | 1.69 | 1.98 | 1.95 |
| hsa-asg-1296 | hsa-asg-1296_st1 | 6.54 | 3.05 | 2.50 | 4.81 | 2.39 | 2.49 | 2.73 |
| hsa-asg-11380 | hsa-asg-11380_st2 | 5.72 | 2.90 | 1.74 | 3.04 | 2.48 | 2.16 | 1.95 |
| hsa-asg-3822 | hsa-asg-3822_st2 | 5.97 | 2.03 | 2.97 | 3.66 | 2.00 | 2.41 | 2.14 |
| hsa-asg-14208 | hsa-asg-14208_st1 | 6.88 | 5.05 | 3.48 | 4.46 | 4.14 | 3.35 | 1.21 |
| hsa-asg-10247 | hsa-asg-10247_st1 | 5.74 | 2.75 | 2.13 | 4.01 | 1.69 | 2.16 | 2.32 |
| hsa-miR-487b | hsa-miR-487b_st2 | 8.81 | 6.05 | 5.79 | 6.97 | 6.90 | 6.22 | 5.34 |
| hsa-miR-187 | hsa-miR-187_st1 | 6.51 | 4.74 | 2.75 | 2.74 | 3.75 | 3.18 | 3.32 |
| hsa-asg-1495 | hsa-asg-1495_st2 | 5.11 | 1.05 | 1.94 | 1.63 | 1.69 | 1.10 | 2.14 |
| hsa-asg-7464 | hsa-asg-7464_st2 | 6.66 | 4.59 | 3.86 | 4.81 | 2.48 | 3.97 | 2.14 |
| hsa-cand852 | hsa-cand852_st2 | 5.81 | 3.05 | 1.94 | 2.84 | 2.98 | 2.24 | 2.65 |
| hsa-asg-11361 | hsa-asg-11361_st2 | 6.47 | 2.75 | 3.48 | 3.38 | 3.25 | 3.59 | 3.32 |
| hsa-asg-13908 | hsa-asg-13908_st2 | 5.69 | 2.03 | 2.50 | 3.66 | 2.48 | 1.44 | 2.80 |
| hsa-miR-183 | hsa-miR-183_st1 | 10.02 | 7.65 | 6.71 | 6.71 | 7.93 | 7.54 | 5.78 |
| hsa-miR-576 | hsa-miR-576_st2 | 5.35 | 2.22 | 2.83 | 3.04 | 1.69 | 1.98 | 1.95 |
| hsa-asg-280 | hsa-asg-280_st1 | 6.01 | 3.18 | 2.67 | 4.46 | 2.10 | 2.49 | 2.14 |
| hsa-miR-539 | hsa-miR-539_st1 | 5.53 | 2.03 | 3.11 | 2.63 | 3.38 | 2.65 | 2.94 |
| hsa-asg-1268 | hsa-asg-1268_st1 | 6.63 | 4.74 | 3.24 | 4.01 | 4.14 | 3.45 | 3.72 |
| hsa-miR-338 | hsa-miR-338_st1 | 7.22 | 5.09 | 4.03 | 5.57 | 4.85 | 4.00 | 2.14 |
| hsa-asg-11160 | hsa-asg-11160_st2 | 6.13 | 2.75 | 3.11 | 3.38 | 3.05 | 2.86 | 2.65 |
| hsa-asg-3251 | hsa-asg-3251_st1 | 6.36 | 4.22 | 4.11 | 4.01 | 2.82 | 3.50 | 3.89 |
| hsa-asg-8174 | hsa-asg-8174_st1 | 6.02 | 3.31 | 4.03 | 2.84 | 2.98 | 2.86 | 3.20 |
| hsa-miR-7 | hsa-miR-7_st1 | 11.40 | 9.45 | 8.18 | 9.71 | 8.61 | 8.16 | 7.65 |
| hsa-miR-182 | hsa-miR-182_st1 | 12.01 | 10.22 | 9.98 | 8.86 | 9.82 | 9.35 | 9.50 |
| hsa-cand26 | hsa-cand26_st2 | 7.65 | 6.11 | 5.56 | 6.04 | 4.06 | 3.64 | 4.70 |
| hsa-miR-381 | hsa-miR-381_st2 | 5.64 | 2.75 | 2.32 | 4.21 | 3.38 | 4.17 | 2.94 |
| hsa-asg-1596 | hsa-asg-1596_st2 | 6.73 | 4.41 | 5.06 | 4.01 | 3.19 | 4.36 | 4.12 |
| hsa-miR-130b | hsa-miR-130b_st1 | 10.45 | 8.12 | 8.01 | 8.96 | 7.74 | 7.49 | 7.29 |
| hsa-asg-548 | hsa-asg-548_st1 | 5.56 | 3.05 | 1.94 | 3.52 | 3.50 | 2.79 | 1.95 |
| hsa-asg-13135 | hsa-asg-13135_st1 | 7.61 | 5.61 | 5.61 | 5.24 | 4.89 | 4.76 | 4.70 |
| hsa-asg-12666 | hsa-asg-12666_st2 | 7.29 | 6.07 | 4.61 | 4.87 | 4.89 | 4.62 | 4.54 |
| hsa-asg-3711 | hsa-asg-3711_st2 | 7.65 | 5.69 | 6.12 | 5.12 | 5.52 | 5.11 | 5.20 |
| hsa-miR-376a | hsa-asg-10049_st1 | 7.25 | 5.01 | 4.85 | 6.09 | 5.55 | 5.31 | 4.05 |
| hsa-asg-13166 | hsa-asg-13166_st2 | 6.14 | 4.47 | 3.36 | 4.87 | 4.94 | 4.07 | 4.12 |
| hsa-asg-10881 | hsa-asg-10881_st1 | 7.38 | 5.71 | 4.98 | 6.06 | 5.43 | 4.76 | 5.40 |
| hsa-asg-2299 | hsa-asg-2299_st1 | 5.72 | 4.69 | 4.11 | 4.54 | 3.60 | 3.40 | 3.53 |
| hsa-miR-494 | hsa-miR-494_st1 | 8.79 | 6.39 | 7.25 | 7.23 | 6.95 | 6.60 | 7.61 |
| hsa-miR-494 | hsa-miR61_st2 | 7.95 | 6.81 | 6.50 | 6.86 | 6.42 | 6.35 | 7.05 |
| hsa-cand581 | hsa-cand581_st1 | 5.46 | 3.83 | 3.58 | 3.66 | 3.89 | 3.68 | 2.65 |
| hsa-miR-329 | hsa-miR-329_st1 | 5.43 | 3.73 | 2.97 | 4.61 | 3.25 | 4.54 | 2.80 |
| hsa-miR-329 | hsa-asg-13204_st2 | 5.32 | 4.07 | 2.83 | 4.21 | 3.38 | 4.20 | 3.43 |
| hsa-asg-13074 | hsa-asg-13074_st2 | 5.72 | 4.47 | 3.95 | 3.66 | 4.65 | 2.93 | 3.20 |
| hsa-asg-12240 | hsa-asg-12240_st1 | 5.80 | 4.15 | 3.11 | 3.90 | 4.06 | 4.86 | 2.65 |
| hsa-asg-7471 | hsa-asg-7471_st1 | 7.46 | 5.58 | 5.67 | 5.68 | 6.74 | 5.67 | 5.25 |
| hsa-asg-7540 | hsa-asg-7540_st2 | 5.79 | 3.73 | 4.38 | 3.04 | 3.50 | 4.11 | 4.92 |
| hsa-asg-6642 | hsa-asg-6642_st2 | 5.39 | 4.00 | 3.78 | 4.38 | 3.85 | 3.68 | 3.48 |
| hsa-asg-6883 | hsa-asg-6883_st1 | 6.03 | 4.59 | 4.18 | 5.09 | 4.44 | 3.59 | 4.35 |
| hsa-asg-10360 | hsa-asg-10360_st1 | 5.02 | 3.42 | 3.36 | 3.04 | 4.65 | 3.68 | 3.20 |
| hsa-asg-10775 | hsa-asg-10775_st2 | 6.42 | 5.09 | 4.71 | 4.81 | 5.05 | 4.33 | 4.62 |
| hsa-miR-379 | hsa-miR-379_st1 | 8.15 | 6.51 | 6.37 | 7.12 | 6.96 | 7.01 | 6.54 |
| hsa-asg-12271 | hsa-asg-12271_st1 | 5.51 | 3.83 | 4.81 | 3.78 | 3.55 | 3.55 | 4.88 |
| hsa-miR-503 | hsa-miR-503_st1 | 8.17 | 6.88 | 7.17 | 7.38 | 6.60 | 6.08 | 6.45 |
| hsa-miR-503 | hsa-miR141_st1 | 8.42 | 7.10 | 7.28 | 7.30 | 6.52 | 6.55 | 6.62 |
| hsa-asg-5018 | hsa-asg-5018_st1 | 5.46 | 4.79 | 3.78 | 3.21 | 4.62 | 3.77 | 3.85 |
| hsa-asg-8290 | hsa-asg-8290_st1 | 9.45 | 7.95 | 8.42 | 6.86 | 7.93 | 8.76 | 8.29 |
| hsa-asg-6924 | hsa-asg-6924_st1 | 8.05 | 6.53 | 7.33 | 6.10 | 7.10 | 6.12 | 6.92 |
| hsa-miR-566 | hsa-miR-566_st1 | 7.35 | 6.72 | 6.12 | 5.12 | 5.83 | 6.11 | 6.10 |
| hsa-asg-7130 | hsa-asg-7130_st1 | 6.84 | 4.93 | 6.25 | 4.65 | 5.34 | 5.51 | 6.13 |
| hsa-miR-660 | hsa-miR-660_st1 | 9.95 | 9.28 | 8.94 | 7.94 | 9.15 | 8.60 | 8.38 |
| hsa-miR-487a | hsa-asg-6915_st1 | 5.11 | 4.07 | 3.58 | 3.90 | 3.38 | 3.85 | 3.72 |
| hsa-asg-4745 | hsa-asg-4745_st2 | 6.60 | 4.35 | 4.98 | 5.81 | 5.15 | 5.12 | 5.40 |
| hsa-asg-1301 | hsa-asg-1301_st1 | 5.11 | 4.47 | 3.68 | 3.90 | 3.71 | 3.77 | 3.63 |
| hsa-asg-3604 | hsa-asg-3604_st1 | 6.78 | 5.88 | 5.79 | 5.98 | 5.79 | 5.75 | 5.15 |
| hsa-asg-3722 | hsa-asg-3722_st1 | 9.99 | 9.12 | 9.51 | 9.24 | 8.61 | 8.85 | 8.99 |
| hsa-miR-628 | hsa-miR-628_st2 | 8.65 | 8.29 | 7.83 | 7.21 | 8.00 | 7.32 | 7.47 |
| hsa-asg-10229 | hsa-asg-10229_st2 | 7.03 | 5.81 | 5.77 | 6.17 | 6.84 | 6.05 | 5.96 |
| hsa-asg-10065 | hsa-asg-10065_st1 | 5.15 | 4.47 | 4.31 | 3.66 | 4.70 | 4.44 | 3.63 |

| | LNneg | | | | | | | | |
|---|---|---|---|---|---|---|---|---|---|
| MicroRNA | 7 | 8 | 9 | M | SD | % | ttest | log2Diff | Fold |
| hsa-miR-375 | 1.00 | 4.61 | 6.37 | 4.27 | 1.82 | 0 | 1.18E−03 | −9.42 | 683 |
| hsa-miR-429 | 2.31 | 2.41 | 5.36 | 2.86 | 1.14 | 0 | 2.69E−04 | −7.40 | 169 |
| hsa-miR-200a | 4.05 | 4.75 | 7.76 | 5.54 | 1.15 | 67 | 5.06E−04 | −6.79 | 110 |
| hsa-asg-14153 | 1.17 | 2.74 | 4.37 | 2.73 | 0.85 | 0 | 6.65E−05 | −6.77 | 109 |
| hsa-miR-205 | 3.38 | 5.30 | 7.74 | 4.71 | 1.85 | 33 | 1.10E−02 | −6.41 | 85.0 |
| hsa-miR-200b | 6.50 | 7.64 | 10.41 | 7.68 | 1.27 | 100 | 2.10E−03 | −5.97 | 62.7 |
| hsa-asg-7637 | 3.27 | 3.61 | 5.24 | 3.78 | 0.77 | 0 | 8.63E−05 | −5.89 | 59.3 |
| hsa-miR-203 | 5.17 | 6.05 | 9.34 | 6.77 | 1.38 | 78 | 4.01E−03 | −5.82 | 56.5 |
| hsa-miR-141 | 3.83 | 3.80 | 4.51 | 4.16 | 0.69 | 0 | 7.15E−05 | −5.45 | 43.8 |
| hsa-asg-924 | 2.14 | 2.74 | 3.50 | 3.38 | 0.89 | 0 | 5.00E−04 | −5.30 | 39.4 |
| hsa-miR-200a* | 2.14 | 3.17 | 2.89 | 2.72 | 0.64 | 0 | 6.89E−05 | −5.10 | 34.2 |
| hsa-miR-200c | 7.96 | 8.87 | 11.51 | 9.05 | 1.21 | 100 | 4.20E−03 | −5.06 | 33.4 |
| hsa-asg-11715 | 0.63 | 1.46 | 3.36 | 1.90 | 0.74 | 0 | 2.80E−04 | −4.79 | 27.7 |
| hsa-miR-605 | 2.90 | 3.03 | 4.44 | 2.52 | 1.03 | 0 | 2.88E−03 | −4.60 | 24.2 |
| hsa-asg-14182 | 2.77 | 1.85 | 0.73 | 1.86 | 0.68 | 0 | 2.43E−04 | −4.49 | 22.5 |
| hsa-asg-12227 | 2.77 | 2.58 | 2.71 | 1.96 | 0.68 | 0 | 2.64E−04 | −4.43 | 21.5 |
| hsa-miR-31 | 7.71 | 8.66 | 10.09 | 9.21 | 0.92 | 100 | 2.40E−03 | −4.21 | 18.5 |
| hsa-asg-2424 | 2.62 | 1.66 | 2.89 | 1.84 | 0.63 | 0 | 2.98E−04 | −4.07 | 16.7 |
| hsa-asg-12139 | 1.60 | 2.05 | 3.50 | 2.32 | 0.59 | 0 | 1.92E−04 | −4.02 | 16.3 |
| hsa-miR-215 | 5.49 | 5.09 | 5.20 | 5.69 | 0.71 | 33 | 6.86E−04 | −3.99 | 15.9 |
| hsa-asg-5886 | 0.78 | 2.41 | 1.83 | 2.07 | 0.62 | 0 | 3.05E−04 | −3.98 | 15.8 |
| hsa-miR-194 | 8.54 | 8.20 | 9.03 | 8.93 | 0.53 | 100 | 9.77E−05 | −3.98 | 15.8 |
| hsa-miR-592 | 3.03 | 2.58 | 4.51 | 2.94 | 0.96 | 0 | 4.78E−03 | −3.90 | 14.9 |
| hsa-miR-592 | 3.03 | 1.66 | 5.40 | 2.89 | 1.21 | 11 | 2.43E−02 | −3.53 | 11.6 |
| hsa-asg-10131 | 2.62 | 3.17 | 5.07 | 3.22 | 0.79 | 0 | 1.58E−03 | −3.89 | 14.8 |
| hsa-asg-13997 | 1.25 | 3.17 | 2.29 | 2.51 | 0.65 | 0 | 5.02E−04 | −3.85 | 14.4 |
| hsa-asg-11463 | 2.31 | 1.66 | 1.14 | 1.91 | 0.44 | 0 | 3.30E−05 | −3.84 | 14.3 |
| hsa-asg-8428 | 0.04 | 2.14 | 1.60 | 1.79 | 0.81 | 0 | 2.01E−03 | −3.84 | 14.3 |
| hsa-asg-5119 | 2.90 | 2.58 | 3.62 | 2.49 | 0.55 | 0 | 1.77E−04 | −3.83 | 14.2 |
| hsa-asg-13705 | 0.37 | 3.17 | 3.22 | 2.27 | 1.11 | 0 | 1.15E−02 | −3.81 | 14.0 |
| hsa-miR-192 | 9.31 | 8.79 | 9.63 | 9.64 | 0.67 | 100 | 7.18E−04 | −3.77 | 13.6 |
| hsa-miR-96 | 3.03 | 1.85 | 3.06 | 3.24 | 0.87 | 11 | 3.53E−03 | −3.72 | 13.2 |
| hsa-asg-9219 | 1.42 | 1.28 | 2.29 | 1.97 | 0.47 | 0 | 8.50E−05 | −3.60 | 12.1 |
| hsa-cand317 | 3.75 | 1.85 | 2.51 | 2.40 | 0.92 | 0 | 6.52E−03 | −3.53 | 11.6 |
| hsa-asg-4219 | 2.90 | 2.74 | 3.94 | 2.43 | 0.87 | 0 | 5.30E−03 | −3.49 | 11.2 |
| hsa-asg-3979 | 0.26 | 2.23 | 1.83 | 2.17 | 0.79 | 0 | 3.70E−03 | −3.36 | 10.3 |
| hsa-asg-4978 | 2.77 | 2.58 | 4.13 | 2.49 | 0.79 | 0 | 3.77E−03 | −3.34 | 10.1 |
| hsa-asg-1296 | 3.15 | 3.88 | 4.13 | 3.24 | 0.85 | 0 | 6.24E−03 | −3.30 | 9.9 |
| hsa-asg-11380 | 2.47 | 2.23 | 3.06 | 2.45 | 0.48 | 0 | 1.86E−04 | −3.27 | 9.6 |
| hsa-asg-3822 | 1.60 | 2.89 | 4.76 | 2.72 | 0.99 | 0 | 1.42E−02 | −3.25 | 9.5 |
| hsa-asg-14208 | 3.03 | 4.04 | 3.94 | 3.63 | 1.09 | 0 | 2.25E−02 | −3.25 | 9.5 |
| hsa-asg-10247 | 0.37 | 3.17 | 3.94 | 2.50 | 1.14 | 0 | 2.68E−02 | −3.24 | 9.5 |
| hsa-miR-487b | 4.88 | 3.71 | 4.37 | 5.58 | 1.11 | 67 | 2.48E−02 | −3.23 | 9.4 |
| hsa-miR-187 | 3.03 | 3.35 | 3.14 | 3.33 | 0.61 | 0 | 1.18E−03 | −3.17 | 9.0 |
| hsa-asg-1495 | 2.90 | 2.23 | 2.89 | 1.95 | 0.67 | 0 | 2.13E−03 | −3.16 | 8.9 |
| hsa-asg-7464 | 3.66 | 2.23 | 3.84 | 3.51 | 0.99 | 0 | 1.68E−02 | −3.15 | 8.9 |
| hsa-cand852 | 2.90 | 2.05 | 3.50 | 2.68 | 0.51 | 0 | 4.14E−04 | −3.13 | 8.8 |
| hsa-asg-11361 | 3.83 | 2.58 | 4.29 | 3.39 | 0.52 | 0 | 4.78E−04 | −3.09 | 8.5 |
| hsa-asg-13908 | 2.62 | 2.41 | 3.73 | 2.63 | 0.72 | 0 | 3.87E−03 | −3.06 | 8.3 |
| hsa-miR-183 | 7.50 | 6.30 | 6.63 | 6.97 | 0.72 | 89 | 3.71E−03 | −3.05 | 8.3 |
| hsa-miR-576 | 1.96 | 2.05 | 3.06 | 2.31 | 0.52 | 0 | 5.52E−04 | −3.05 | 8.3 |
| hsa-asg-280 | 1.78 | 3.40 | 4.51 | 2.97 | 1.00 | 0 | 2.06E−02 | −3.04 | 8.2 |
| hsa-miR-539 | 1.96 | 2.58 | 1.36 | 2.52 | 0.63 | 0 | 1.95E−03 | −3.01 | 8.1 |
| hsa-asg-1268 | 3.83 | 2.23 | 3.62 | 3.67 | 0.69 | 0 | 3.58E−03 | −2.96 | 7.8 |
| hsa-miR-338 | 4.76 | 3.40 | 4.87 | 4.30 | 1.04 | 11 | 2.89E−02 | −2.92 | 7.6 |
| hsa-asg-11160 | 2.47 | 3.51 | 5.11 | 3.21 | 0.79 | 0 | 7.92E−03 | −2.92 | 7.6 |
| hsa-asg-3251 | 2.90 | 3.03 | 3.22 | 3.52 | 0.55 | 0 | 1.17E−03 | −2.84 | 7.2 |
| hsa-asg-8174 | 2.77 | 2.74 | 4.13 | 3.21 | 0.53 | 0 | 1.01E−03 | −2.81 | 7.0 |
| hsa-miR-7 | 8.64 | 8.56 | 8.46 | 8.60 | 0.64 | 100 | 3.19E−03 | −2.79 | 6.9 |
| hsa-miR-182 | 8.97 | 8.56 | 8.11 | 9.26 | 0.70 | 100 | 5.62E−03 | −2.75 | 6.7 |
| hsa-cand26 | 5.27 | 4.04 | 5.44 | 4.98 | 0.91 | 22 | 2.38E−02 | −2.67 | 6.4 |
| hsa-miR-381 | 3.48 | 1.28 | 3.22 | 3.08 | 0.91 | 0 | 2.91E−02 | −2.56 | 5.9 |
| hsa-asg-1596 | 4.12 | 4.19 | 4.37 | 4.20 | 0.49 | 0 | 1.19E−03 | −2.53 | 5.8 |
| hsa-miR-130b | 7.93 | 7.69 | 8.08 | 7.92 | 0.48 | 100 | 1.02E−03 | −2.53 | 5.8 |
| hsa-asg-548 | 3.38 | 2.74 | 4.58 | 3.05 | 0.83 | 0 | 2.04E−02 | −2.51 | 5.7 |
| hsa-asg-13135 | 5.14 | 4.44 | 5.57 | 5.11 | 0.44 | 22 | 6.12E−04 | −2.51 | 5.7 |
| hsa-asg-12666 | 4.80 | 3.97 | 4.82 | 4.80 | 0.55 | 11 | 2.76E−03 | −2.49 | 5.6 |
| hsa-asg-3711 | 4.52 | 4.41 | 4.84 | 5.17 | 0.55 | 0 | 2.66E−03 | −2.48 | 5.6 |
| hsa-miR-376a | 3.83 | 4.12 | 4.64 | 4.83 | 0.75 | 11 | 1.56E−02 | −2.43 | 5.4 |
| hsa-asg-13166 | 3.57 | 2.05 | 4.04 | 3.94 | 0.88 | 0 | 4.62E−02 | −2.20 | 4.6 |
| hsa-asg-10881 | 4.18 | 5.01 | 5.20 | 5.19 | 0.55 | 22 | 5.36E−03 | −2.19 | 4.6 |
| hsa-asg-2299 | 3.38 | 2.23 | 2.89 | 3.60 | 0.77 | 0 | 3.18E−02 | −2.12 | 4.3 |
| hsa-miR-494 | 5.71 | 5.84 | 6.58 | 6.68 | 0.64 | 100 | 1.42E−02 | −2.11 | 4.3 |
| hsa-miR-494 | 5.38 | 5.77 | 6.87 | 6.45 | 0.55 | 89 | 3.27E−02 | −1.50 | 2.8 |
| hsa-cand581 | 3.83 | 2.41 | 3.22 | 3.42 | 0.54 | 0 | 7.27E−03 | −2.04 | 4.1 |
| hsa-miR-329 | 2.77 | 3.29 | 2.71 | 3.41 | 0.74 | 0 | 3.17E−02 | −2.02 | 4.0 |
| hsa-miR-329 | 3.98 | 2.58 | 3.50 | 3.58 | 0.59 | 0 | 2.39E−02 | −1.74 | 3.3 |
| hsa-asg-13074 | 3.38 | 3.80 | 3.62 | 3.74 | 0.56 | 0 | 1.01E−02 | −1.98 | 3.9 |
| hsa-asg-12240 | 3.03 | 4.38 | 4.37 | 3.84 | 0.74 | 0 | 3.54E−02 | −1.97 | 3.9 |
| hsa-asg-7471 | 5.24 | 4.97 | 6.07 | 5.65 | 0.52 | 56 | 1.09E−02 | −1.81 | 3.5 |
| hsa-asg-7540 | 3.91 | 4.44 | 3.94 | 4.00 | 0.55 | 0 | 1.53E−02 | −1.79 | 3.5 |
| hsa-asg-6642 | 2.90 | 2.89 | 3.73 | 3.63 | 0.48 | 0 | 8.74E−03 | −1.76 | 3.4 |
| hsa-asg-6883 | 4.18 | 3.51 | 4.58 | 4.28 | 0.49 | 0 | 9.92E−03 | −1.75 | 3.4 |
| hsa-asg-10360 | 3.15 | 2.41 | 2.71 | 3.29 | 0.63 | 0 | 3.25E−02 | −1.73 | 3.3 |
| hsa-asg-10775 | 4.80 | 4.50 | 4.70 | 4.73 | 0.24 | 0 | 1.73E−04 | −1.69 | 3.2 |
| hsa-miR-379 | 6.33 | 6.13 | 6.20 | 6.58 | 0.37 | 100 | 3.70E−03 | −1.57 | 3.0 |
| hsa-asg-12271 | 3.15 | 4.04 | 3.94 | 3.95 | 0.57 | 0 | 3.13E−02 | −1.56 | 3.0 |
| hsa-miR-503 | 6.39 | 6.60 | 5.99 | 6.62 | 0.46 | 78 | 1.29E−02 | −1.56 | 2.9 |
| hsa-miR-503 | 6.85 | 6.87 | 6.74 | 6.87 | 0.30 | 100 | 1.21E−03 | −1.55 | 2.9 |
| hsa-asg-5018 | 3.38 | 4.12 | 3.73 | 3.92 | 0.52 | 0 | 2.25E−02 | −1.54 | 2.9 |
| hsa-asg-8290 | 7.45 | 7.99 | 7.59 | 7.92 | 0.56 | 100 | 3.25E−02 | −1.54 | 2.9 |
| hsa-asg-6924 | 6.35 | 5.96 | 6.54 | 6.55 | 0.48 | 78 | 1.72E−02 | −1.50 | 2.8 |
| hsa-miR-566 | 5.55 | 6.02 | 5.42 | 5.89 | 0.47 | 56 | 1.85E−02 | −1.47 | 2.8 |
| hsa-asg-7130 | 4.67 | 5.44 | 5.49 | 5.38 | 0.57 | 22 | 4.15E−02 | −1.46 | 2.7 |
| hsa-miR-660 | 7.78 | 7.90 | 8.59 | 8.51 | 0.55 | 100 | 3.84E−02 | −1.44 | 2.7 |
| hsa-miR-487a | 3.66 | 3.71 | 3.62 | 3.72 | 0.20 | 0 | 1.80E−04 | −1.39 | 2.6 |
| hsa-asg-4745 | 5.27 | 4.97 | 6.05 | 5.23 | 0.49 | 44 | 2.99E−02 | −1.37 | 2.6 |
| hsa-asg-1301 | 4.18 | 3.80 | 2.89 | 3.78 | 0.43 | 0 | 1.93E−02 | −1.33 | 2.5 |
| hsa-asg-3604 | 5.71 | 5.30 | 5.28 | 5.63 | 0.30 | 78 | 6.55E−03 | −1.16 | 2.2 |
| hsa-asg-3722 | 8.29 | 9.00 | 8.68 | 8.92 | 0.37 | 100 | 2.45E−02 | −1.07 | 2.1 |
| hsa-miR-628 | 7.23 | 7.64 | 7.43 | 7.60 | 0.37 | 100 | 2.79E−02 | −1.05 | 2.1 |
| hsa-asg-10229 | 5.47 | 5.69 | 6.02 | 5.98 | 0.39 | 100 | 3.35E−02 | −1.05 | 2.1 |
| hsa-asg-10065 | 4.05 | 3.80 | 3.94 | 4.11 | 0.39 | 0 | 3.36E−02 | −1.04 | 2.1 |

SD, standard deviation;
%, percentage of samples expressing miRNA above background levels;
Log2Diff, difference in VSN-transformed expression bewteen STO and LNneg samples.

### Example 30

### miRNAs Differentally Expressed Between Normal Testicle Tissue and Normal Lymph Nodes

[0328] To identify miRNAs that may be useful markers for metastasis of cancerous testes cells to lymph nodes, the inventors identified miRNAs that are expressed at significantly higher levels in normal testes tissue than in cancer-negative lymph nodes.

[0329] Total RNA, purified from one normal human testicle sample (FirstChoice® Human Testicle Total RNA, cat. no.AM7972; Ambion, Austin, Tex., USA) and from nine normal human lymph node samples (FirstChoice® Human Lymph Node Total RNA, cat. no. AM7894; Ambion, Austin, Tex., USA) was purchased from Ambion. miRNA purification and labeling and microarray expression analyses were performed as described above in Example 2.

[0330] The inventors identified 412 miRNAs (100 verified, 312 predicted) with significant differential expression between the normal testicle and normal lymph node samples (|log 2Diff| testicle vs LN neg≧1 and p-value<0.05) (Table 29). Among the verified miRNAs, hsa-miR-513 was expressed at a level over 200-fold higher in the testicle sample than in the lymh node samples; hsa-miR-514 and -509 were expressed at levels between 100- and 200-fold higher in the testicle sample; 9 miRNAs (hsa-miR-493-5p, -506, -383, -411, -493-3p, -510, -187, -508 and -517a ) were expressed at levels between 50- and 100-fold higher in the testicle sample; 27 miRNAs were expressed between 20- and 50-fold higher in testicle; 29miRNAs were expressed between 10- and 20-fold higher in testicle compared to LNneg; and 14 miRNAs were expressed between 5- and 10-fold higher in the testicle sample than in normal lymph nodes. Among the predicted miRNAs, hsa-asg-5638_st2 was expressed at a level over 800-fold higher in the testicle sample than in the normal lymph nodes; hsa-miR-5630_st2, -1088 st1 and -11338_st2) were expressed at levels between 100- and 200-fold higher in the testicle sample; 6 miRNAs were expressed between 50- and 100-fold higher in testicle; 33 miRNAs were expressed between 20- and 50-fold higher in testicle; 59 miRNAs were expressed between 10- and 50-fold higher in testicle; and 97 miRNAs were expressed between 5- and 10-fold higher in the testicle sample than in normal lymph nodes.

TABLE 29
MicroRNAs Differentially Expressed Between Normal Testicle (TES) and
Cancer-Negative Lymph Node Samples (LNneg) from Patients.

| | Probe | | LNneg | | | | | |
|---|---|---|---|---|---|---|---|---|
| MicroRNA | ID | TES | 1 | 2 | 3 | 4 | 5 | 6 |
| hsa-asg-5638 | hsa-asg-5638_st2 | 12.22 | 4.00 | 2.50 | 2.15 | 2.57 | 1.62 | 2.57 |
| hsa-miR-513 | hsa-miR-513_st1 | 13.11 | 6.17 | 6.89 | 4.99 | 5.44 | 4.00 | 5.87 |
| hsa-asg-5630 | hsa-asg-5630_st2 | 10.66 | 4.22 | 3.86 | 2.63 | 2.74 | 2.72 | 4.32 |
| hsa-asg-1088 | hsa-asg-1088_st1 | 9.34 | 1.83 | 2.13 | 1.63 | 1.59 | 2.07 | 0.87 |
| hsa-miR-514 | hsa-miR-514_st1 | 9.00 | 2.03 | 1.54 | 2.40 | 1.69 | 1.10 | 1.57 |
| hsa-asg-11338 | hsa-asg-11338_st2 | 11.53 | 4.07 | 5.59 | 3.52 | 4.28 | 4.36 | 4.92 |
| hsa-miR-509 | hsa-miR-509_st2 | 12.89 | 7.10 | 6.67 | 5.57 | 5.79 | 5.76 | 6.72 |
| hsa-miR-493-5p | hsa-miR-493-5p_st1 | 11.20 | 4.35 | 3.78 | 6.89 | 6.18 | 6.30 | 3.63 |
| hsa-asg-6283 | hsa-asg-6283_st1 | 10.67 | 3.83 | 5.43 | 3.30 | 4.59 | 6.32 | 5.16 |
| hsa-asg-13404 | hsa-asg-13404_st2 | 9.17 | 4.15 | 2.67 | 5.28 | 2.90 | 3.24 | 1.57 |
| hsa-miR-506 | hsa-miR-506_st2 | 12.43 | 5.76 | 5.53 | 6.78 | 6.12 | 6.23 | 5.96 |
| hsa-asg-14208 | hsa-asg-14208_st1 | 9.60 | 5.05 | 3.48 | 4.46 | 4.14 | 3.35 | 1.21 |
| hsa-miR-383 | hsa-miR-383_st1 | 8.42 | 3.31 | 2.83 | 2.40 | 2.57 | 3.18 | 1.30 |
| hsa-asg-10309 | hsa-asg-10309_st1 | 10.18 | 5.24 | 5.74 | 2.15 | 4.65 | 6.00 | 4.96 |
| hsa-miR-411 | hsa-miR-411_st1 | 9.77 | 4.84 | 3.68 | 4.54 | 5.22 | 5.52 | 2.94 |
| hsa-miR-493-3p | hsa-asg-8480_st1 | 7.24 | 0.56 | 0.57 | 2.74 | 1.48 | 1.35 | 0.64 |
| hsa-miR-493-3p | hsa-miR-493-3p_st1 | 7.39 | 4.64 | 3.05 | 4.06 | 2.98 | 2.24 | 1.86 |
| hsa-asg-7751 | hsa-asg-7751_st2 | 9.20 | 2.90 | 3.68 | 3.38 | 2.74 | 5.03 | 5.07 |
| hsa-miR-510 | hsa-miR-510_st2 | 10.58 | 5.27 | 5.02 | 4.75 | 4.65 | 4.71 | 5.04 |
| hsa-miR-187 | hsa-miR-187_st1 | 9.09 | 4.74 | 2.75 | 2.74 | 3.75 | 3.18 | 3.32 |
| hsa-miR-508 | hsa-miR-508_st1 | 11.90 | 5.71 | 5.93 | 6.66 | 6.63 | 6.16 | 6.36 |
| hsa-asg-13922 | hsa-asg-13922_st1 | 9.55 | 4.69 | 5.35 | 1.63 | 4.82 | 5.55 | 5.11 |
| hsa-miR-517a | hsa-miR-517a_st1 | 9.72 | 4.84 | 5.32 | 6.26 | 3.55 | 3.06 | 3.77 |
| hsa-miR-517a | hsa-miR-517b_st1 | 9.76 | 4.97 | 5.56 | 6.51 | 3.85 | 3.18 | 3.77 |
| hsa-miR-299-5p | hsa-miR-299-5p_st2 | 10.37 | 5.71 | 4.44 | 5.81 | 6.37 | 5.96 | 2.94 |
| hsa-miR202 | hsa-miR202_st2 | 9.08 | 3.83 | 2.67 | 4.93 | 3.94 | 3.59 | 2.40 |
| hsa-asg-9514 | hsa-asg-9514_st1 | 8.95 | 2.58 | 4.50 | 3.21 | 2.48 | 4.33 | 3.63 |
| hsa-asg-9510 | hsa-asg-9510_st1 | 11.69 | 6.92 | 7.25 | 4.99 | 6.80 | 8.04 | 7.10 |
| hsa-miR-487b | hsa-miR-487b_st2 | 11.04 | 6.05 | 5.79 | 6.97 | 6.90 | 6.22 | 5.34 |
| hsa-asg-5617 | hsa-asg-5617_st1 | 8.19 | 3.73 | 3.24 | 3.90 | 3.60 | 3.40 | 2.65 |
| hsa-asg-9512 | hsa-asg-9512_st1 | 11.62 | 6.41 | 6.89 | 4.61 | 6.57 | 7.78 | 7.00 |
| hsa-miR-539 | hsa-miR-539_st1 | 7.87 | 2.03 | 3.11 | 2.63 | 3.38 | 2.65 | 2.94 |
| hsa-miR-539 | hsa-miR177_st1 | 7.29 | 2.58 | 2.50 | 1.37 | 2.39 | 1.80 | 1.86 |
| hsa-miR-432 | hsa-miR-432_st2 | 10.12 | 4.53 | 5.38 | 5.93 | 5.52 | 5.74 | 5.62 |
| hsa-asg-7472 | hsa-asg-7472_st2 | 7.26 | 1.63 | 2.13 | 1.89 | 2.00 | 2.86 | 1.76 |
| hsa-miR-495 | hsa-miR-495_st1 | 10.52 | 6.01 | 4.76 | 6.97 | 6.25 | 6.29 | 4.38 |
| hsa-asg-4037 | hsa-asg-4037_st1 | 7.79 | 2.75 | 2.32 | 1.89 | 3.50 | 3.35 | 2.32 |
| hsa-asg-3081 | hsa-asg-3081_st1 | 9.26 | 4.74 | 4.44 | 3.21 | 4.28 | 5.72 | 4.49 |
| hsa-asg-8486 | hsa-asg-8486_st2 | 8.50 | 2.75 | 3.36 | 3.21 | 2.66 | 3.85 | 3.89 |
| hsa-miR-127 | hsa-miR-127_st1 | 11.74 | 6.80 | 5.52 | 7.96 | 7.53 | 7.66 | 5.66 |
| hsa-asg-20 | hsa-asg-20_st1 | 7.97 | 3.91 | 3.91 | 1.00 | 3.50 | 3.81 | 3.48 |
| hsa-asg-3743 | hsa-asg-3743_st1 | 8.39 | 3.18 | 4.28 | 3.30 | 3.25 | 3.45 | 2.87 |
| hsa-miR-154 | hsa-miR-154_st2 | 8.65 | 3.73 | 2.50 | 4.30 | 4.35 | 4.88 | 3.08 |
| hsa-asg-5021 | hsa-asg-5021_st1 | 9.80 | 5.17 | 4.38 | 7.00 | 6.05 | 5.88 | 3.48 |
| hsa-miR-369-5p | hsa-miR-369-5p_st2 | 8.56 | 3.53 | 2.67 | 4.46 | 4.35 | 4.33 | 2.49 |
| hsa-miR-369-5p | hsa-asg-1521_st1 | 8.18 | 3.73 | 3.36 | 4.01 | 2.20 | 3.68 | 3.68 |
| hsa-asg-13166 | hsa-asg-13166_st2 | 8.95 | 4.47 | 3.36 | 4.87 | 4.94 | 4.07 | 4.12 |
| hsa-asg-13801 | hsa-asg-13801_st1 | 7.67 | 2.03 | 3.18 | 3.13 | 3.12 | 3.81 | 3.77 |
| hsa-miR-184 | hsa-miR-184_st1 | 9.09 | 5.50 | 4.50 | 4.11 | 4.28 | 3.89 | 5.11 |
| hsa-cand443 | hsa-cand443_st2 | 9.53 | 3.91 | 5.10 | 3.90 | 4.48 | 5.73 | 5.21 |
| hsa-miR-409-3p | hsa-miR-409-3p_st1 | 8.66 | 2.22 | 3.42 | 5.14 | 4.98 | 4.73 | 2.94 |
| hsa-miR-134 | hsa-miR-134_st2 | 10.07 | 5.09 | 5.73 | 6.00 | 5.84 | 5.67 | 4.15 |
| hsa-asg-13254 | hsa-asg-13254_st1 | 9.77 | 5.58 | 5.32 | 6.66 | 5.89 | 5.87 | 3.97 |
| hsa-miR-376a | hsa-miR-376a_st2 | 9.23 | 5.13 | 4.03 | 5.49 | 5.66 | 4.82 | 3.97 |
| hsa-miR-376a | hsa-asg-10049_st1 | 9.62 | 5.01 | 4.85 | 6.09 | 5.55 | 5.31 | 4.05 |
| hsa-miR-376a | hsa-asg-14234_st1 | 8.06 | 3.31 | 4.25 | 3.38 | 3.98 | 4.82 | 3.63 |
| hsa-asg-1020 | hsa-asg-1020_st2 | 10.79 | 6.39 | 7.36 | 3.45 | 6.17 | 7.05 | 6.87 |
| hsa-miR-487a | hsa-miR-487a_st2 | 7.33 | 2.22 | 2.83 | 2.63 | 3.38 | 2.16 | 3.20 |
| hsa-miR-379 | hsa-miR-379_st1 | 11.39 | 6.51 | 6.37 | 7.12 | 6.96 | 7.01 | 6.54 |
| hsa-asg-3597 | hsa-asg-3597_st2 | 11.40 | 6.62 | 7.72 | 5.07 | 6.87 | 7.74 | 6.93 |
| hsa-asg-8242 | hsa-asg-8242_st2 | 7.90 | 2.75 | 3.53 | 1.37 | 4.35 | 4.20 | 4.43 |
| hsa-asg-3009 | hsa-asg-3009_st1 | 9.51 | 5.17 | 5.57 | 4.34 | 5.20 | 5.40 | 5.00 |
| hsa-miR-204 | hsa-miR-204_st2 | 10.92 | 7.17 | 5.77 | 5.98 | 8.20 | 6.73 | 5.40 |
| hsa-miR-381 | hsa-miR-381_st2 | 7.81 | 2.75 | 2.32 | 4.21 | 3.38 | 4.17 | 2.94 |
| hsa-miR-520a* | hsa-miR-520a-_st2 | 6.52 | 1.24 | 2.67 | 3.04 | 1.28 | 2.41 | 1.57 |
| hsa-asg-1608 | hsa-asg-1608_st2 | 8.45 | 4.79 | 4.63 | 2.52 | 4.53 | 4.84 | 4.35 |
| hsa-miR-368 | hsa-miR-368_st2 | 10.94 | 6.48 | 6.47 | 7.70 | 8.08 | 7.68 | 5.18 |
| hsa-miR-526a | hsa-miR-526a_st2 | 7.45 | 2.75 | 3.36 | 4.75 | 1.90 | 2.24 | 2.80 |
| hsa-cand206 | hsa-cand206_st1 | 7.33 | 2.22 | 1.94 | 3.78 | 3.60 | 2.65 | 2.14 |
| hsa-asg-3742 | hsa-asg-3742_st1 | 8.67 | 3.83 | 4.90 | 3.66 | 4.25 | 4.84 | 3.43 |
| hsa-miR-202 | hsa-miR-202_st1 | 9.46 | 4.69 | 5.02 | 4.38 | 4.96 | 5.02 | 5.58 |
| hsa-miR-485-5p | hsa-miR-485-5p_st2 | 7.70 | 3.42 | 3.24 | 3.38 | 3.66 | 3.24 | 1.95 |
| hsa-miR-518f* | hsa-miR-518f-_st2 | 7.14 | 2.03 | 2.13 | 4.68 | 2.66 | 2.24 | 1.95 |
| hsa-miR-494 | hsa-miR-494_st1 | 11.26 | 6.39 | 7.25 | 7.23 | 6.95 | 6.60 | 7.61 |
| hsa-miR-494 | hsa-miR61_st2 | 10.51 | 6.81 | 6.50 | 6.86 | 6.42 | 6.35 | 7.05 |
| hsa-miR-526c | hsa-miR-526c_st1 | 7.48 | 3.53 | 2.67 | 5.04 | 2.66 | 1.53 | 2.94 |
| hsa-asg-677 | hsa-asg-677_st2 | 8.61 | 3.42 | 4.66 | 3.90 | 4.14 | 5.03 | 4.74 |
| hsa-asg-5996 | hsa-asg-5996_st2 | 11.22 | 8.09 | 7.62 | 5.28 | 7.67 | 8.00 | 6.94 |
| hsa-miR-520g | hsa-miR-520g_st1 | 7.30 | 2.22 | 3.11 | 3.04 | 3.38 | 1.80 | 2.94 |
| hsa-asg-4756 | hsa-asg-4756_st2 | 7.36 | 2.75 | 3.05 | 3.45 | 1.90 | 4.30 | 3.58 |
| hsa-miR-382 | hsa-miR-382_st1 | 11.23 | 7.16 | 6.80 | 7.35 | 7.13 | 7.40 | 6.51 |
| hsa-miR-450 | hsa-miR-450_st2 | 8.27 | 4.22 | 2.67 | 2.84 | 3.89 | 3.59 | 3.97 |
| hsa-miR-450 | hsa-asg-14228_st2 | 7.21 | 3.53 | 2.13 | 2.40 | 2.98 | 2.49 | 3.08 |
| hsa-asg-12356 | hsa-asg-12356_st1 | 11.87 | 7.94 | 8.57 | 5.85 | 7.74 | 8.64 | 8.25 |
| hsa-asg-8129 | hsa-asg-8129_st2 | 7.72 | 3.05 | 3.91 | 2.28 | 3.12 | 4.30 | 4.72 |
| hsa-cand733 | hsa-cand733_st1 | 8.33 | 6.03 | 4.21 | 2.03 | 4.82 | 5.94 | 5.04 |
| hsa-asg-6619 | hsa-asg-6619_st1 | 7.13 | 2.58 | 0.57 | 2.03 | 4.70 | 2.86 | 4.22 |
| hsa-asg-8128 | hsa-asg-8128_st1 | 7.18 | 3.42 | 3.99 | 3.45 | 2.98 | 3.35 | 2.87 |
| hsa-asg-14209 | hsa-asg-14209_st1 | 8.81 | 4.59 | 4.90 | 5.68 | 3.75 | 3.06 | 3.48 |
| hsa-asg-7295 | hsa-asg-7295_st2 | 6.76 | 2.90 | 2.13 | 3.38 | 1.59 | 2.07 | 2.49 |
| hsa-asg-10478 | hsa-asg-10478_st2 | 7.70 | 3.05 | 4.03 | 3.38 | 2.48 | 4.38 | 4.12 |
| hsa-asg-7527 | hsa-asg-7527_st2 | 8.48 | 4.59 | 5.00 | 2.74 | 3.12 | 4.92 | 4.81 |
| hsa-miR-449 | hsa-miR-449_st2 | 6.95 | 2.58 | 1.54 | 4.54 | 3.05 | 3.59 | 1.67 |
| hsa-miR-503 | hsa-miR-503_st1 | 10.85 | 6.88 | 7.17 | 7.38 | 6.60 | 6.08 | 6.45 |
| hsa-miR-503 | hsa-miR141_st1 | 10.74 | 7.10 | 7.28 | 7.30 | 6.52 | 6.55 | 6.62 |
| hsa-cand91 | hsa-cand91_st1 | 8.46 | 4.53 | 5.57 | 2.15 | 4.85 | 4.38 | 5.15 |
| hsa-miR-608 | hsa-miR-608_st2 | 7.48 | 3.91 | 4.07 | 1.76 | 3.55 | 4.14 | 5.07 |
| hsa-miR-135b | hsa-miR-135b_st2 | 6.75 | 1.43 | 2.67 | 2.40 | 2.82 | 2.33 | 3.08 |
| hsa-miR-135b | hsa-cand78_st1 | 6.28 | 3.42 | 2.50 | 3.66 | 4.14 | 3.68 | 2.80 |
| hsa-asg-13741 | hsa-asg-13741_st2 | 6.11 | 0.15 | 2.50 | 1.89 | 2.57 | 1.89 | 2.49 |
| hsa-miR-105 | hsa-miR-105_st1 | 6.15 | 1.63 | 1.34 | 2.63 | 0.82 | 2.72 | 1.39 |
| hsa-miR-433 | hsa-miR-433_st2 | 6.95 | 2.41 | 2.67 | 4.54 | 2.90 | 4.17 | 2.32 |
| hsa-miR-377 | hsa-miR-377_st1 | 6.44 | 3.42 | 2.32 | 2.15 | 2.30 | 2.49 | 2.65 |
| hsa-miR-572 | hsa-miR-572_st1 | 10.93 | 8.20 | 7.65 | 3.90 | 7.78 | 8.17 | 6.87 |
| hsa-asg-13077 | hsa-asg-13077_st1 | 8.87 | 5.97 | 5.06 | 3.21 | 5.26 | 6.00 | 5.00 |
| hsa-miR-516-5p | hsa-asg-13160_st1 | 6.94 | 2.41 | 2.97 | 3.90 | 2.74 | 2.49 | 2.05 |
| hsa-miR-516-5p | hsa-miR-516-5p_st1 | 6.94 | 4.53 | 3.68 | 3.90 | 1.18 | 2.49 | 2.57 |
| hsa-asg-9009 | hsa-asg-9009_st1 | 8.68 | 5.01 | 5.52 | 4.16 | 4.48 | 4.41 | 5.20 |
| hsa-asg-3782 | hsa-asg-3782_st1 | 10.18 | 6.08 | 7.03 | 5.37 | 6.18 | 6.72 | 6.50 |
| hsa-miR-409-5p | hsa-miR-409-5p_st1 | 9.70 | 5.13 | 4.98 | 6.68 | 6.08 | 6.08 | 5.11 |
| hsa-miR-424 | hsa-miR-424_st1 | 9.76 | 5.79 | 6.11 | 5.53 | 5.91 | 5.75 | 3.43 |
| hsa-asg-1089 | hsa-asg-1089_st1 | 6.32 | 3.31 | 1.74 | 2.40 | 2.66 | 2.93 | 1.57 |
| hsa-miR-485-3p | hsa-miR23_st2 | 7.29 | 4.29 | 2.50 | 4.11 | 3.25 | 2.41 | 3.20 |
| hsa-miR-485-3p | hsa-miR-485-3p_st2 | 7.24 | 3.64 | 2.97 | 4.30 | 4.41 | 4.24 | 3.08 |
| hsa-miR-410 | hsa-miR-410_st1 | 6.57 | 2.41 | 2.32 | 1.37 | 3.71 | 2.49 | 2.80 |
| hsa-asg-5149 | hsa-asg-5149_st2 | 8.90 | 5.31 | 4.92 | 4.71 | 4.82 | 5.40 | 5.21 |
| hsa-asg-3672 | hsa-asg-3672_st1 | 9.22 | 5.34 | 6.49 | 4.16 | 5.36 | 5.72 | 5.99 |
| hsa-miR-519d | hsa-miR-519d_st1 | 6.61 | 1.43 | 2.32 | 3.78 | 2.57 | 2.49 | 2.87 |
| hsa-asg-1199 | hsa-asg-1199_st1 | 6.81 | 2.22 | 3.95 | 2.84 | 2.74 | 3.24 | 2.32 |
| hsa-asg-1619 | hsa-asg-1619_st2 | 7.29 | 4.35 | 3.24 | 2.84 | 4.80 | 3.12 | 2.80 |
| hsa-miR-329 | hsa-asg-13589_st2 | 7.13 | 1.63 | 3.11 | 3.78 | 3.71 | 4.38 | 2.32 |
| hsa-miR-329 | hsa-miR-329_st1 | 7.33 | 3.73 | 2.97 | 4.61 | 3.25 | 4.54 | 2.80 |
| hsa-miR-329 | hsa-asg-13204_st2 | 7.21 | 4.07 | 2.83 | 4.21 | 3.38 | 4.20 | 3.43 |
| hsa-asg-4283 | hsa-asg-4283_st2 | 7.14 | 3.91 | 3.48 | 2.63 | 3.80 | 3.89 | 2.80 |
| hsa-cand930 | hsa-cand930_st1 | 7.47 | 3.31 | 4.52 | 3.96 | 1.90 | 4.11 | 3.14 |
| hsa-asg-1881 | hsa-asg-1881_st2 | 7.93 | 3.42 | 5.30 | 2.28 | 3.75 | 4.07 | 5.21 |
| hsa-miR-520h | hsa-miR-520h_st1 | 6.54 | 3.18 | 2.67 | 3.21 | 1.90 | 2.65 | 2.80 |
| hsa-miR-34c | hsa-miR-34c_st2 | 7.48 | 1.83 | 2.50 | 3.52 | 3.66 | 3.59 | 3.01 |
| hsa-miR-376b | hsa-miR-376b_st1 | 6.19 | 1.83 | 2.13 | 4.11 | 3.32 | 2.65 | 1.03 |
| hsa-asg-9696 | hsa-asg-9696_st1 | 10.36 | 7.42 | 6.31 | 6.68 | 7.04 | 6.23 | 6.22 |
| hsa-asg-13878 | hsa-asg-13878_st2 | 7.10 | 2.90 | 3.48 | 2.84 | 4.82 | 4.24 | 3.32 |
| hsa-asg-3754 | hsa-asg-3754_st2 | 8.65 | 4.97 | 4.96 | 4.84 | 3.44 | 5.09 | 5.00 |
| hsa-miR-515-3p | hsa-miR-515-3p_st2 | 5.32 | 2.41 | 0.97 | 1.37 | 1.28 | 1.71 | 1.39 |
| hsa-miR-380-3p | hsa-miR-380-3p_st2 | 5.37 | 2.22 | 1.15 | 1.12 | 0.57 | 2.16 | 2.32 |
| hsa-miR-380-3p | hsa-asg-13118_st1 | 5.04 | 2.03 | 3.11 | 3.04 | 1.28 | 1.62 | 2.32 |
| hsa-cand561 | hsa-cand561_st1 | 6.86 | 2.41 | 3.53 | 1.24 | 2.30 | 3.24 | 4.15 |
| hsa-asg-6815 | hsa-asg-6815_st1 | 9.05 | 4.97 | 6.29 | 4.21 | 5.13 | 5.58 | 6.22 |
| hsa-asg-8616 | hsa-asg-8616_st2 | 7.21 | 3.42 | 4.44 | 1.63 | 4.53 | 3.55 | 4.19 |
| hsa-asg-8630 | hsa-asg-8630_st2 | 9.10 | 5.52 | 6.35 | 3.45 | 5.78 | 5.98 | 6.65 |
| hsa-cand150 | hsa-cand150_st2 | 7.36 | 6.26 | 3.68 | 2.40 | 2.48 | 3.12 | 3.43 |
| hsa-asg-1203 | hsa-asg-1203_st1 | 7.46 | 4.47 | 4.31 | 2.63 | 3.80 | 4.17 | 4.49 |
| hsa-asg-7159 | hsa-asg-7159_st2 | 7.09 | 3.53 | 3.24 | 2.40 | 3.94 | 3.89 | 3.43 |
| hsa-asg-9262 | hsa-asg-9262_st1 | 8.20 | 4.59 | 4.28 | 3.96 | 5.74 | 4.71 | 4.52 |
| hsa-asg-5606 | hsa-asg-5606_st1 | 6.39 | 2.41 | 3.99 | 2.74 | 2.10 | 1.89 | 3.68 |
| hsa-asg-4872 | hsa-asg-4872_st1 | 7.25 | 3.31 | 4.50 | 3.04 | 3.85 | 2.65 | 4.22 |
| hsa-asg-8893 | hsa-asg-8893_st1 | 8.38 | 4.97 | 4.92 | 4.71 | 4.80 | 5.44 | 4.98 |
| hsa-asg-10947 | hsa-asg-10947_st1 | 6.98 | 3.64 | 3.48 | 1.63 | 5.09 | 3.73 | 3.63 |
| hsa-asg-124 | hsa-asg-124_st1 | 8.67 | 4.88 | 5.28 | 4.30 | 4.56 | 5.70 | 5.34 |
| hsa-asg-8987 | hsa-asg-8987_st1 | 7.22 | 2.22 | 4.78 | 2.74 | 3.44 | 3.50 | 4.96 |
| hsa-asg-3740 | hsa-asg-3740_st1 | 8.71 | 4.88 | 6.41 | 4.68 | 5.07 | 5.43 | 5.88 |
| hsa-miR223 | hsa-miR223_st2 | 8.99 | 5.50 | 6.08 | 4.96 | 4.70 | 5.14 | 6.01 |
| hsa-asg-7671 | hsa-asg-7671_st1 | 9.85 | 6.24 | 7.39 | 5.76 | 6.13 | 6.82 | 6.90 |
| hsa-asg-12735 | hsa-asg-12735_st1 | 10.03 | 6.81 | 6.64 | 5.85 | 6.49 | 7.38 | 7.02 |
| hsa-asg-8138 | hsa-asg-8138_st2 | 9.23 | 6.41 | 6.52 | 4.42 | 5.36 | 6.40 | 6.34 |
| hsa-miR-520f | hsa-miR-520c_st2 | 5.75 | 2.41 | 1.34 | 1.89 | 1.69 | 2.16 | 2.14 |
| hsa-miR-299-3p | hsa-miR-299-3p_st2 | 6.50 | 2.41 | 3.36 | 3.38 | 2.90 | 3.40 | 2.73 |
| hsa-miR-299-3p | hsa-asg-10378_st1 | 6.30 | 3.64 | 3.36 | 3.21 | 1.90 | 2.41 | 1.95 |
| hsa-asg-8329 | hsa-asg-8329_st1 | 9.23 | 6.26 | 6.52 | 4.42 | 5.87 | 6.14 | 6.17 |
| hsa-asg-6890 | hsa-asg-6890_st1 | 7.86 | 4.41 | 4.47 | 4.01 | 4.59 | 3.85 | 4.32 |
| hsa-miR-154* | hsa-miR-154-_st2 | 7.89 | 5.81 | 3.48 | 4.21 | 4.98 | 4.59 | 3.89 |
| hsa-asg-1270 | hsa-asg-1270_st2 | 7.19 | 4.22 | 3.58 | 1.89 | 4.06 | 4.54 | 4.83 |
| hsa-miR-487a | hsa-asg-6915_st1 | 7.28 | 4.07 | 3.58 | 3.90 | 3.38 | 3.85 | 3.72 |
| hsa-asg-12531 | hsa-asg-12531_st1 | 6.76 | 3.18 | 3.58 | 1.63 | 3.19 | 3.45 | 4.38 |
| hsa-miR-526b | hsa-miR-526b_st2 | 6.07 | 2.22 | 2.67 | 3.21 | 3.05 | 1.80 | 2.57 |
| hsa-miR-767-5p | hsa-asg-558_st1 | 5.47 | 3.05 | 2.32 | 0.88 | 1.79 | 0.71 | 1.57 |
| hsa-asg-5741_st2 | hsa-asg-5741_st2 | 7.21 | 4.00 | 5.14 | 2.63 | 4.38 | 4.64 | 2.73 |
| hsa-asg-1196 | hsa-asg-1196_st1 | 10.73 | 8.26 | 7.60 | 5.88 | 6.63 | 8.41 | 8.06 |
| hsa-asg-7388 | hsa-asg-7388_st1 | 9.76 | 6.51 | 6.92 | 5.47 | 6.19 | 6.95 | 6.91 |
| hsa-asg-2845 | hsa-asg-2845_st2 | 6.45 | 2.90 | 3.78 | 3.04 | 3.66 | 1.98 | 3.14 |
| hsa-asg-4472 | hsa-asg-4472_st2 | 6.67 | 3.73 | 3.95 | 2.84 | 2.90 | 3.59 | 4.29 |
| hsa-asg-3322 | hsa-asg-3322_st2 | 6.53 | 3.53 | 4.85 | 1.89 | 1.28 | 3.45 | 3.89 |
| hsa-asg-12253 | hsa-asg-12253_st2 | 9.05 | 4.93 | 7.02 | 4.90 | 4.98 | 5.87 | 7.17 |
| hsa-asg-8293 | hsa-asg-8293_st2 | 9.92 | 7.00 | 7.28 | 4.93 | 6.25 | 7.31 | 7.08 |
| hsa-miR-542-5p | hsa-miR-542-5p_st2 | 7.25 | 3.91 | 2.83 | 3.66 | 3.60 | 3.81 | 2.80 |
| hsa-asg-3185 | hsa-asg-3185_st1 | 7.17 | 4.47 | 4.21 | 2.74 | 4.92 | 4.49 | 5.21 |
| hsa-asg-3406 | hsa-asg-3406_st1 | 6.83 | 3.73 | 3.05 | 3.13 | 2.98 | 3.81 | 4.08 |
| hsa-asg-12515 | hsa-asg-12515_st2 | 7.36 | 4.00 | 4.25 | 3.04 | 4.10 | 4.57 | 4.32 |
| hsa-cand330 | hsa-cand330_st2 | 7.57 | 4.74 | 4.98 | 3.52 | 4.70 | 5.12 | 4.12 |
| hsa-asg-9491 | hsa-asg-9491_st1 | 7.92 | 4.53 | 4.96 | 3.72 | 4.82 | 4.69 | 4.96 |
| hsa-asg-8039 | hsa-asg-8039_st2 | 6.96 | 3.31 | 4.28 | 3.13 | 3.44 | 2.79 | 3.43 |
| hsa-asg-3731 | hsa-asg-3731_st1 | 8.37 | 4.59 | 6.57 | 4.46 | 4.65 | 4.59 | 5.77 |
| hsa-miR-449b | hsa-miR-449b_st1 | 6.53 | 1.83 | 3.24 | 4.46 | 2.48 | 3.55 | 2.80 |
| hsa-miR-654 | hsa-miR-654_st1 | 7.24 | 2.41 | 5.19 | 4.16 | 3.89 | 3.81 | 5.45 |
| hsa-miR-654 | hsa-asg-33_st1 | 7.47 | 3.18 | 6.20 | 5.09 | 4.51 | 4.41 | 5.15 |
| hsa-asg-12959 | hsa-asg-12959_st1 | 6.52 | 3.91 | 4.31 | 2.84 | 3.38 | 2.57 | 3.97 |
| hsa-miR-525 | hsa-miR-525_st2 | 5.30 | 2.41 | 1.54 | 2.63 | 0.57 | 2.57 | 2.14 |
| hsa-asg-5205 | hsa-asg-5205_st1 | 10.35 | 8.01 | 7.74 | 5.04 | 7.49 | 8.27 | 6.87 |
| hsa-asg-12440 | hsa-asg-12440_st2 | 8.00 | 4.74 | 4.83 | 3.84 | 4.75 | 4.80 | 5.23 |
| hsa-asg-1319 | hsa-asg-1319_st2 | 9.04 | 5.50 | 6.23 | 5.26 | 5.74 | 6.43 | 6.09 |
| hsa-asg-7935 | hsa-asg-7935_st2 | 9.07 | 6.98 | 6.67 | 4.30 | 6.23 | 6.47 | 5.80 |
| hsa-asg-8896 | hsa-asg-8896_st2 | 8.07 | 3.73 | 5.27 | 4.16 | 5.11 | 4.84 | 4.52 |
| hsa-asg-10236 | hsa-asg-10236_st2 | 7.08 | 4.07 | 3.48 | 3.04 | 4.51 | 5.14 | 3.72 |
| hsa-asg-8668 | hsa-asg-8668_st2 | 7.11 | 4.53 | 4.11 | 3.21 | 5.05 | 5.03 | 4.49 |
| hsa-asg-9849 | hsa-asg-9849_st2 | 9.95 | 6.37 | 7.98 | 5.47 | 6.39 | 6.76 | 7.48 |
| hsa-asg-13471 | hsa-asg-13471_st1 | 7.88 | 4.74 | 4.71 | 4.38 | 5.11 | 5.31 | 5.34 |
| hsa-asg-9334 | hsa-asg-9334_st2 | 9.96 | 6.32 | 7.60 | 6.15 | 6.41 | 6.92 | 7.31 |
| hsa-miR-124a | hsa-miR-124a_st1 | 7.02 | 4.29 | 4.18 | 3.78 | 4.80 | 3.81 | 3.32 |
| hsa-miR-124a | hsa-cand79_st1 | 6.58 | 3.53 | 3.78 | 3.78 | 4.44 | 3.64 | 2.14 |
| hsa-asg-5265 | hsa-asg-5265_st1 | 9.73 | 6.74 | 7.06 | 5.82 | 6.30 | 7.25 | 6.97 |
| hsa-asg-381 | hsa-asg-381_st1 | 6.49 | 3.05 | 3.58 | 3.04 | 3.66 | 3.81 | 3.32 |
| hsa-asg-11698 | hsa-asg-11698_st2 | 11.15 | 8.56 | 9.32 | 6.82 | 7.99 | 8.60 | 9.03 |
| hsa-asg-8638 | hsa-asg-8638_st1 | 10.34 | 7.94 | 7.93 | 5.88 | 7.27 | 8.03 | 7.81 |
| hsa-miR-517c | hsa-miR-517c_st2 | 5.82 | 2.90 | 2.50 | 3.04 | 3.60 | 3.06 | 3.43 |
| hsa-miR-542-3p | hsa-miR-542-3p_st1 | 8.65 | 5.09 | 5.25 | 6.01 | 6.29 | 5.71 | 5.62 |
| hsa-asg-11443 | hsa-asg-11443_st1 | 6.18 | 4.15 | 3.58 | 2.84 | 2.66 | 3.50 | 2.65 |
| hsa-miR-512-3p | hsa-miR-512-3p_st2 | 5.93 | 2.58 | 2.67 | 4.01 | 2.10 | 2.57 | 1.95 |
| hsa-asg-265 | hsa-asg-265_st2 | 9.05 | 6.45 | 7.13 | 5.14 | 5.70 | 5.87 | 7.03 |
| hsa-asg-1310 | hsa-asg-1310_st1 | 5.30 | 2.90 | 2.32 | 1.63 | 2.10 | 2.93 | 3.53 |
| hsa-asg-508 | hsa-asg-508_st2 | 9.48 | 6.70 | 7.04 | 5.14 | 6.71 | 7.24 | 7.14 |
| hsa-asg-8902 | hsa-asg-8902_st2 | 7.73 | 6.29 | 5.73 | 4.25 | 4.25 | 5.09 | 5.04 |
| hsa-asg-8476 | hsa-asg-8476_st1 | 9.02 | 5.58 | 6.36 | 6.43 | 6.32 | 5.75 | 6.17 |
| hsa-asg-11523 | hsa-asg-11523_st1 | 11.01 | 8.99 | 8.63 | 7.47 | 8.25 | 8.86 | 8.36 |
| hsa-asg-1341 | hsa-asg-1341_st1 | 12.79 | 10.8 | 10.54 | 8.34 | 10.2 | 10.8 | 10.19 |
| hsa-asg-8763 | hsa-asg-8763_st2 | 9.28 | 7.01 | 7.42 | 5.12 | 6.57 | 6.75 | 7.04 |
| hsa-asg-4840 | hsa-asg-4840_st1 | 7.74 | 5.44 | 5.02 | 3.52 | 5.28 | 5.40 | 4.98 |
| hsa-asg-12298 | hsa-asg-12298_st1 | 6.96 | 4.64 | 5.08 | 4.06 | 3.89 | 3.81 | 4.15 |
| hsa-asg-6934 | hsa-asg-6934_st2 | 6.07 | 2.75 | 4.50 | 2.40 | 2.57 | 2.72 | 3.97 |
| hsa-asg-9515 | hsa-asg-9515_st1 | 8.44 | 5.05 | 5.88 | 5.09 | 5.36 | 5.72 | 6.20 |
| hsa-asg-2535 | hsa-asg-2535_st2 | 9.91 | 8.09 | 7.44 | 5.53 | 7.17 | 7.75 | 7.13 |
| hsa-asg-5272 | hsa-asg-5272_st2 | 8.29 | 5.88 | 6.40 | 4.16 | 5.36 | 5.87 | 6.21 |
| hsa-miR-507 | hsa-miR-507_st1 | 4.91 | 1.83 | 2.13 | 2.84 | 1.28 | 1.98 | 2.14 |
| hsa-miR112 | hsa-miR112_st1 | 10.27 | 7.55 | 8.23 | 6.14 | 7.20 | 7.94 | 8.13 |
| hsa-asg-8255 | hsa-asg-8255_st2 | 8.93 | 6.15 | 7.00 | 4.90 | 6.43 | 6.71 | 6.76 |
| hsa-miR-369-3p | hsa-miR-369-3p_st1 | 5.42 | 2.58 | 1.74 | 2.63 | 2.90 | 3.40 | 1.95 |
| hsa-asg-8446 | hsa-asg-8446_st2 | 8.43 | 5.24 | 6.40 | 4.46 | 5.31 | 6.41 | 6.13 |
| hsa-asg-4654 | hsa-asg-4654_st1 | 11.29 | 9.21 | 9.10 | 7.53 | 8.49 | 9.12 | 9.20 |
| hsa-miR-129 | hsa-miR-129_st1 | 7.45 | 4.84 | 4.76 | 5.24 | 4.80 | 4.17 | 3.89 |
| hsa-cand805 | hsa-cand805_st2 | 11.02 | 8.23 | 9.20 | 7.34 | 8.24 | 8.82 | 8.70 |
| hsa-asg-11237 | hsa-asg-11237_st1 | 12.44 | 10.7 | 9.91 | 8.46 | 10.2 | 10.9 | 9.77 |
| hsa-asg-3728 | hsa-asg-3728_st1 | 9.16 | 6.64 | 7.33 | 5.43 | 6.53 | 6.79 | 6.90 |
| hsa-asg-758 | hsa-asg-758_st1 | 8.89 | 6.45 | 6.59 | 5.07 | 6.13 | 7.04 | 6.24 |
| hsa-asg-9269 | hsa-asg-9269_st2 | 5.82 | 2.58 | 2.50 | 4.68 | 2.90 | 2.57 | 2.65 |
| hsa-miR-496 | hsa-miR-496_st1 | 4.94 | 2.41 | 2.67 | 1.89 | 2.30 | 1.62 | 2.49 |
| hsa-asg-7130 | hsa-asg-7130_st1 | 8.20 | 4.93 | 6.25 | 4.65 | 5.34 | 5.51 | 6.13 |
| hsa-asg-2844 | hsa-asg-2844_st1 | 5.67 | 3.73 | 4.18 | 2.15 | 2.82 | 1.98 | 2.94 |
| hsa-asg-13231 | hsa-asg-13231_st1 | 6.28 | 3.91 | 4.11 | 4.21 | 4.44 | 2.93 | 3.38 |
| hsa-asg-14185 | hsa-asg-14185_st1 | 7.32 | 3.64 | 5.35 | 3.38 | 4.67 | 4.59 | 5.58 |
| hsa-asg-11802 | hsa-asg-11802_st1 | 9.78 | 7.71 | 8.25 | 6.01 | 7.20 | 7.73 | 7.92 |
| hsa-miR-132 | hsa-miR-132_st1 | 11.10 | 9.71 | 8.51 | 8.34 | 8.34 | 8.56 | 8.02 |
| hsa-asg-9500 | hsa-asg-9500_st1 | 6.70 | 4.59 | 4.58 | 3.59 | 3.80 | 3.55 | 4.08 |
| hsa-asg-4789 | hsa-asg-4789_st1 | 7.18 | 4.41 | 5.19 | 3.30 | 4.21 | 3.89 | 5.61 |
| hsa-cand287 | hsa-cand287_st1 | 5.60 | 2.22 | 2.97 | 2.63 | 3.38 | 3.12 | 2.94 |
| hsa-asg-4392 | hsa-asg-4392_st1 | 12.36 | 10.6 | 10.03 | 8.15 | 10.0 | 10.8 | 9.84 |
| hsa-asg-4438 | hsa-asg-4438_st2 | 7.36 | 4.53 | 4.50 | 5.04 | 4.53 | 4.11 | 4.49 |
| hsa-asg-9513 | hsa-asg-9513_st1 | 8.87 | 5.93 | 6.75 | 5.33 | 5.83 | 6.13 | 6.33 |
| hsa-asg-6292 | hsa-asg-6292_st2 | 11.48 | 9.76 | 9.57 | 7.45 | 8.84 | 9.88 | 8.81 |
| hsa-asg-7376 | hsa-asg-7376_st1 | 5.32 | 3.05 | 2.13 | 2.15 | 2.39 | 2.41 | 3.53 |
| hsa-asg-7048 | hsa-asg-7048_st1 | 7.50 | 5.05 | 5.75 | 3.59 | 4.92 | 4.20 | 5.40 |
| hsa-asg-1239 | hsa-asg-1239_st1 | 8.26 | 5.13 | 6.38 | 4.25 | 5.24 | 5.98 | 6.69 |
| hsa-asg-924 | hsa-asg-924_st1 | 6.11 | 4.64 | 4.25 | 3.38 | 4.44 | 2.65 | 2.73 |
| hsa-asg-12381 | hsa-asg-12381_st1 | 8.91 | 6.03 | 7.14 | 5.01 | 5.83 | 6.71 | 6.84 |
| hsa-asg-9920 | hsa-asg-9920_st1 | 10.01 | 8.07 | 8.33 | 6.09 | 7.77 | 8.07 | 7.77 |
| hsa-cand207 | hsa-cand207_st1 | 5.88 | 2.58 | 4.11 | 3.66 | 2.48 | 3.64 | 3.63 |
| hsa-cand266 | hsa-cand266_st1 | 9.07 | 6.73 | 7.20 | 5.49 | 7.08 | 6.90 | 7.03 |
| hsa-asg-4915 | hsa-asg-4915_st1 | 5.65 | 2.41 | 3.78 | 2.15 | 2.57 | 3.59 | 2.87 |
| hsa-cand899 | hsa-cand899_st2 | 6.71 | 2.75 | 4.74 | 3.30 | 3.98 | 4.17 | 4.77 |
| hsa-asg-9727 | hsa-asg-9727_st1 | 7.04 | 4.64 | 5.64 | 3.52 | 4.38 | 5.03 | 4.70 |
| hsa-asg-11850 | hsa-asg-11850_st1 | 12.54 | 10.5 | 10.17 | 8.54 | 10.4 | 11.1 | 9.97 |
| hsa-asg-14230 | hsa-asg-14230_st1 | 6.48 | 4.29 | 3.68 | 4.38 | 4.56 | 3.29 | 3.43 |
| hsa-asg-8303 | hsa-asg-8303_st2 | 6.19 | 3.31 | 4.50 | 4.30 | 4.53 | 4.04 | 4.12 |
| hsa-asg-7999 | hsa-asg-7999_st1 | 5.78 | 3.73 | 3.95 | 3.21 | 3.12 | 1.98 | 3.32 |
| hsa-miR144 | hsa-miR144_st2 | 6.01 | 4.59 | 4.38 | 2.63 | 3.38 | 2.65 | 2.65 |
| hsa-cand764 | hsa-cand764_st1 | 8.46 | 5.86 | 6.04 | 5.55 | 5.73 | 6.35 | 6.04 |
| hsa-asg-7250 | hsa-asg-7250_st1 | 6.39 | 4.00 | 4.83 | 2.52 | 3.32 | 4.59 | 3.97 |
| hsa-asg-4808 | hsa-asg-4808_st1 | 7.13 | 3.73 | 6.08 | 3.84 | 3.71 | 4.36 | 5.61 |
| hsa-asg-7475 | hsa-asg-7475_st1 | 6.64 | 3.53 | 4.11 | 3.78 | 4.21 | 4.57 | 3.72 |
| hsa-asg-6063 | hsa-asg-6063_st2 | 11.36 | 9.14 | 9.37 | 8.01 | 9.04 | 9.46 | 9.16 |
| hsa-asg-4759 | hsa-asg-4759_st1 | 9.42 | 7.03 | 7.97 | 5.85 | 6.74 | 7.35 | 7.54 |
| hsa-miR-520d | hsa-miR-520d_st1 | 5.58 | 2.75 | 3.36 | 2.15 | 2.90 | 3.50 | 3.58 |
| hsa-asg-887 | hsa-asg-887_st2 | 8.81 | 6.39 | 7.06 | 5.62 | 6.29 | 6.81 | 7.01 |
| hsa-asg-13047 | hsa-asg-13047_st2 | 7.69 | 5.31 | 5.96 | 4.71 | 5.52 | 4.41 | 5.71 |
| hsa-asg-9687 | hsa-asg-9687_st1 | 6.72 | 4.74 | 4.76 | 3.90 | 4.65 | 3.85 | 4.19 |
| hsa-asg-9509 | hsa-asg-9509_st2 | 8.07 | 4.47 | 6.82 | 4.65 | 5.09 | 5.37 | 6.38 |
| hsa-asg-3373 | hsa-asg-3373_st2 | 5.32 | 3.53 | 1.94 | 2.63 | 3.75 | 4.04 | 3.63 |
| hsa-asg-5889 | hsa-asg-5889_st2 | 5.96 | 3.73 | 4.31 | 3.78 | 3.32 | 3.97 | 4.32 |
| hsa-asg-11565 | hsa-asg-11565_st1 | 6.40 | 4.00 | 4.94 | 3.04 | 3.12 | 3.93 | 4.79 |
| hsa-asg-13013 | hsa-asg-13013_st1 | 4.97 | 2.75 | 2.67 | 2.63 | 2.10 | 2.33 | 1.76 |
| hsa-asg-2041 | hsa-asg-2041_st1 | 8.08 | 5.93 | 6.09 | 5.37 | 5.59 | 5.87 | 5.70 |
| hsa-asg-1169 | hsa-asg-1169_st2 | 7.92 | 5.27 | 6.60 | 4.34 | 5.38 | 5.59 | 6.19 |
| hsa-miR-217 | hsa-miR-217_st1 | 5.52 | 3.31 | 3.58 | 2.63 | 2.48 | 3.77 | 3.32 |
| hsa-asg-7460 | hsa-asg-7460_st1 | 5.96 | 2.41 | 4.71 | 3.38 | 3.19 | 3.45 | 4.79 |
| hsa-asg-9681 | hsa-asg-9681_st1 | 6.58 | 4.84 | 4.25 | 4.99 | 4.75 | 3.68 | 2.80 |
| hsa-asg-1293 | hsa-asg-1293_st2 | 8.48 | 6.39 | 6.83 | 5.59 | 6.19 | 6.21 | 6.58 |
| hsa-asg-202 | hsa-asg-202_st1 | 6.68 | 4.29 | 5.60 | 3.13 | 3.75 | 4.27 | 5.11 |
| hsa-miR-522 | hsa-miR-522_st2 | 5.47 | 2.75 | 2.83 | 3.66 | 3.12 | 2.93 | 3.43 |
| hsa-asg-2074 | hsa-asg-2074_st2 | 5.47 | 2.41 | 3.95 | 2.40 | 3.25 | 3.45 | 3.53 |
| hsa-asg-3614 | hsa-asg-3614_st1 | 6.90 | 4.79 | 5.36 | 3.59 | 4.38 | 4.00 | 5.11 |
| hsa-asg-14176 | hsa-asg-14176_st1 | 7.87 | 6.05 | 5.67 | 5.28 | 6.77 | 6.23 | 5.37 |
| hsa-asg-11977 | hsa-asg-11977_st1 | 8.29 | 6.15 | 6.74 | 4.90 | 5.92 | 6.33 | 7.12 |
| hsa-asg-6234 | hsa-asg-6234_st1 | 12.09 | 10.4 | 10.68 | 8.61 | 10.0 | 10.3 | 10.42 |
| hsa-asg-14006 | hsa-asg-14006_st2 | 7.15 | 4.74 | 5.35 | 4.75 | 4.96 | 4.90 | 4.15 |
| hsa-cand659 | hsa-cand659_st1 | 10.14 | 7.82 | 7.93 | 7.34 | 7.90 | 8.06 | 8.08 |
| hsa-asg-4069 | hsa-asg-4069_st1 | 6.48 | 4.29 | 4.88 | 2.74 | 4.44 | 4.27 | 4.92 |
| hsa-asg-9209 | hsa-asg-9209_st2 | 8.73 | 6.13 | 6.97 | 5.97 | 6.34 | 6.48 | 6.84 |
| hsa-asg-8557 | hsa-asg-8557_st1 | 7.80 | 6.05 | 5.87 | 4.90 | 5.15 | 5.72 | 5.61 |
| hsa-asg-3783 | hsa-asg-3783_st1 | 8.08 | 5.55 | 6.98 | 4.42 | 5.24 | 6.05 | 6.81 |
| hsa-miR-499 | hsa-miR12_st1 | 7.21 | 5.44 | 4.76 | 5.37 | 6.66 | 4.07 | 4.38 |
| hsa-asg-9196 | hsa-asg-9196_st2 | 5.60 | 2.41 | 4.71 | 3.21 | 3.55 | 2.41 | 4.12 |
| hsa-asg-4207 | hsa-asg-4207_st1 | 7.10 | 5.09 | 5.41 | 4.01 | 4.82 | 5.62 | 5.57 |
| hsa-asg-11847 | hsa-asg-11847_st1 | 8.86 | 7.23 | 7.50 | 5.47 | 6.45 | 7.02 | 6.96 |
| hsa-asg-7140 | hsa-asg-7140_st2 | 8.34 | 6.51 | 6.31 | 6.09 | 5.07 | 6.48 | 6.24 |
| hsa-asg-1934 | hsa-asg-1934_st1 | 5.19 | 3.31 | 3.58 | 2.15 | 1.48 | 3.50 | 3.20 |
| hsa-asg-6282 | hsa-asg-6282_st1 | 8.32 | 6.68 | 6.71 | 4.58 | 6.04 | 6.63 | 6.94 |
| hsa-miR-370 | hsa-miR-370_st1 | 7.13 | 4.64 | 5.23 | 4.71 | 5.05 | 4.69 | 5.34 |
| hsa-asg-8636 | hsa-asg-8636_st2 | 8.43 | 5.84 | 6.86 | 5.43 | 5.53 | 6.21 | 6.65 |
| hsa-asg-9143 | hsa-asg-9143_st2 | 9.15 | 7.30 | 7.88 | 5.81 | 6.70 | 7.21 | 7.66 |
| hsa-asg-8280 | hsa-asg-8280_st2 | 7.46 | 6.31 | 4.98 | 3.90 | 5.09 | 6.20 | 4.60 |
| hsa-asg-11992 | hsa-asg-11992_st2 | 9.26 | 7.35 | 7.73 | 5.12 | 6.45 | 7.50 | 7.48 |
| hsa-asg-2311 | hsa-asg-2311_st1 | 6.93 | 4.84 | 5.68 | 4.65 | 4.38 | 4.59 | 5.18 |
| hsa-asg-7170 | hsa-asg-7170_st2 | 6.16 | 4.22 | 3.78 | 3.21 | 4.10 | 3.81 | 4.70 |
| hsa-asg-3168 | hsa-asg-3168_st1 | 5.37 | 3.73 | 3.78 | 3.38 | 1.48 | 2.65 | 4.19 |
| hsa-asg-8404 | hsa-asg-8404_st2 | 5.84 | 2.22 | 4.25 | 3.04 | 3.55 | 4.17 | 3.63 |
| hsa-miR-212 | hsa-miR-212_st2 | 7.60 | 6.26 | 5.68 | 6.18 | 5.71 | 5.14 | 5.05 |
| hsa-asg-10500 | hsa-asg-10500_st2 | 6.11 | 3.73 | 4.85 | 2.40 | 3.38 | 3.59 | 4.05 |
| hsa-asg-1174 | hsa-asg-1174_st2 | 9.38 | 7.36 | 8.00 | 6.23 | 7.22 | 7.48 | 7.71 |
| hsa-miR-9* | hsa-miR-9-_st2 | 7.76 | 6.19 | 6.05 | 5.57 | 6.10 | 5.37 | 5.81 |
| hsa-cand705 | hsa-cand705_st2 | 4.84 | 2.58 | 2.97 | 2.63 | 2.48 | 2.33 | 2.80 |
| hsa-asg-3376 | hsa-asg-3376_st1 | 6.01 | 3.83 | 2.97 | 4.87 | 4.65 | 3.97 | 4.12 |
| hsa-asg-1966 | hsa-asg-1966_st2 | 6.67 | 4.74 | 4.11 | 5.28 | 4.41 | 5.39 | 4.32 |
| hsa-asg-1621 | hsa-asg-1621_st2 | 8.64 | 6.07 | 7.40 | 6.25 | 6.14 | 6.45 | 7.18 |
| hsa-asg-7465 | hsa-asg-7465_st2 | 7.01 | 4.64 | 4.31 | 4.01 | 6.17 | 5.05 | 4.15 |
| hsa-asg-14066 | hsa-asg-14066_st2 | 8.69 | 7.21 | 7.18 | 5.79 | 6.81 | 6.59 | 6.96 |
| hsa-asg-10883 | hsa-asg-10883_st1 | 9.24 | 7.63 | 7.13 | 7.34 | 8.22 | 8.00 | 6.52 |
| hsa-asg-4439 | hsa-asg-4439_st2 | 5.42 | 3.83 | 4.31 | 3.21 | 2.66 | 1.62 | 3.63 |
| hsa-miR166 | hsa-miR166_st1 | 7.02 | 4.93 | 5.94 | 4.50 | 5.22 | 5.00 | 5.64 |
| hsa-miR219 | hsa-miR219_st2 | 6.42 | 4.69 | 5.52 | 3.13 | 3.94 | 4.27 | 5.11 |
| hsa-asg-1168 | hsa-asg-1168_st1 | 8.10 | 6.15 | 6.80 | 5.26 | 5.78 | 6.54 | 6.64 |
| hsa-asg-4597 | hsa-asg-4597_st1 | 9.59 | 7.93 | 8.59 | 6.94 | 7.28 | 7.74 | 8.38 |
| hsa-miR-518c* | hsa-miR-518c-_st2 | 6.12 | 3.83 | 5.14 | 4.38 | 3.12 | 3.35 | 4.38 |
| hsa-miR-372 | hsa-miR-372_st2 | 6.03 | 4.64 | 3.36 | 4.11 | 3.71 | 4.24 | 3.97 |
| hsa-asg-1919 | hsa-asg-1919_st1 | 9.25 | 7.21 | 7.70 | 5.94 | 7.29 | 7.74 | 7.80 |
| hsa-asg-4070 | hsa-asg-4070_st2 | 8.72 | 6.64 | 7.70 | 5.21 | 6.64 | 7.43 | 7.68 |
| hsa-asg-3746 | hsa-asg-3746_st1 | 9.70 | 8.01 | 8.78 | 6.56 | 7.51 | 8.00 | 8.44 |
| hsa-asg-4155 | hsa-asg-4155_st1 | 7.84 | 5.88 | 6.64 | 4.75 | 5.65 | 6.25 | 6.50 |
| hsa-asg-9257 | hsa-asg-9257_st2 | 7.71 | 4.69 | 6.40 | 4.68 | 5.55 | 5.67 | 6.39 |
| hsa-miR-371 | hsa-miR-371_st2 | 5.71 | 3.91 | 4.18 | 3.78 | 3.85 | 3.40 | 3.48 |
| hsa-asg-11883 | hsa-asg-11883_st1 | 8.09 | 5.90 | 6.01 | 6.68 | 6.73 | 6.15 | 5.96 |
| hsa-asg-10414 | hsa-asg-10414_st1 | 9.30 | 6.96 | 8.43 | 5.97 | 7.02 | 7.67 | 7.99 |
| hsa-asg-13613 | hsa-asg-13613_st2 | 9.73 | 8.18 | 8.61 | 6.70 | 7.93 | 8.46 | 8.36 |
| hsa-asg-8597 | hsa-asg-8597_st1 | 7.49 | 4.93 | 5.00 | 5.69 | 5.46 | 5.85 | 5.56 |
| hsa-asg-9248 | hsa-asg-9248_st2 | 10.14 | 8.57 | 8.95 | 7.30 | 8.04 | 8.83 | 8.94 |
| hsa-asg-2315 | hsa-asg-2315_st2 | 6.80 | 5.58 | 5.78 | 4.58 | 4.65 | 5.36 | 4.85 |
| hsa-asg-7043 | hsa-asg-7043_st2 | 6.80 | 4.35 | 6.00 | 3.84 | 4.14 | 5.03 | 5.71 |
| hsa-asg-8956 | hsa-asg-8956_st1 | 8.07 | 6.34 | 7.08 | 4.84 | 6.32 | 6.43 | 6.92 |
| hsa-asg-7764 | hsa-asg-7764_st2 | 10.24 | 8.66 | 9.01 | 7.07 | 8.30 | 8.94 | 8.99 |
| hsa-asg-10638 | hsa-asg-10638_st2 | 10.66 | 9.24 | 9.20 | 7.43 | 8.68 | 9.23 | 9.03 |
| hsa-miR-7 | hsa-miR-7_st1 | 10.56 | 9.45 | 8.18 | 9.71 | 8.61 | 8.16 | 7.65 |
| hsa-asg-3291 | hsa-asg-3291_st2 | 8.24 | 6.55 | 6.77 | 6.18 | 5.63 | 6.74 | 6.01 |
| hsa-asg-1860 | hsa-asg-1860_st1 | 10.79 | 9.32 | 9.61 | 7.85 | 8.80 | 9.84 | 9.38 |
| hsa-asg-6813 | hsa-asg-6813_st2 | 6.35 | 4.41 | 5.72 | 4.11 | 3.60 | 5.02 | 5.25 |
| hsa-asg-11619 | hsa-asg-11619_st1 | 8.82 | 6.41 | 7.82 | 6.44 | 6.54 | 7.33 | 7.73 |
| hsa-asg-13052 | hsa-asg-13052_st1 | 5.54 | 3.83 | 4.11 | 2.40 | 3.71 | 3.64 | 4.32 |
| hsa-asg-1462 | hsa-asg-1462_st2 | 5.96 | 4.00 | 4.25 | 3.90 | 4.28 | 4.27 | 4.19 |
| hsa-asg-5326 | hsa-asg-5326_st2 | 8.20 | 6.95 | 7.13 | 5.74 | 6.26 | 6.65 | 6.47 |
| hsa-miR-660 | hsa-miR-660_st1 | 10.42 | 9.28 | 8.94 | 7.94 | 9.15 | 8.60 | 8.38 |
| hsa-miR-373 | hsa-miR-373_st1 | 5.93 | 4.00 | 4.11 | 4.21 | 4.62 | 4.17 | 3.97 |
| hsa-asg-7690 | hsa-asg-7690_st1 | 6.04 | 5.24 | 4.44 | 3.78 | 4.53 | 4.49 | 4.12 |
| hsa-asg-2049 | hsa-asg-2049_st2 | 5.07 | 3.83 | 3.36 | 2.40 | 3.71 | 3.24 | 3.43 |
| hsa-asg-2290 | hsa-asg-2290_st2 | 9.74 | 8.30 | 8.56 | 7.13 | 7.79 | 8.20 | 8.71 |
| hsa-asg-7240 | hsa-asg-7240_st1 | 7.62 | 6.05 | 6.19 | 5.01 | 6.10 | 6.23 | 6.05 |
| hsa-asg-12964 | hsa-asg-12964_st2 | 5.63 | 4.88 | 2.83 | 4.01 | 4.25 | 3.89 | 2.65 |
| hsa-asg-13780 | hsa-asg-13780_st1 | 5.04 | 2.03 | 3.86 | 3.38 | 3.12 | 2.93 | 2.65 |
| hsa-miR-9 | hsa-miR-9_st2 | 5.16 | 3.42 | 3.48 | 2.84 | 3.25 | 3.59 | 2.14 |
| hsa-cand208 | hsa-cand208_st1 | 4.87 | 2.58 | 3.48 | 3.04 | 3.12 | 3.29 | 3.53 |
| hsa-asg-3073 | hsa-asg-3073_st2 | 7.35 | 5.37 | 6.09 | 4.99 | 4.96 | 5.74 | 6.15 |
| hsa-asg-11155 | hsa-asg-11155_st1 | 9.30 | 8.13 | 8.35 | 6.47 | 7.60 | 8.03 | 8.06 |
| hsa-asg-1617 | hsa-asg-1617_st2 | 8.78 | 6.64 | 7.69 | 5.82 | 6.99 | 7.43 | 7.95 |
| hsa-asg-12069 | hsa-asg-12069_st1 | 8.70 | 6.19 | 7.85 | 6.05 | 6.47 | 6.96 | 7.76 |
| hsa-miR-501 | hsa-miR-501_st1 | 6.21 | 5.24 | 4.81 | 2.84 | 5.09 | 4.04 | 4.60 |
| hsa-asg-5413 | hsa-asg-5413_st2 | 7.45 | 5.44 | 6.76 | 5.33 | 5.62 | 6.37 | 6.00 |
| hsa-asg-8545 | hsa-asg-8545_st1 | 6.62 | 5.09 | 5.84 | 4.54 | 3.89 | 5.03 | 5.77 |
| hsa-asg-92 | hsa-asg-92_st1 | 6.25 | 4.15 | 5.53 | 4.01 | 4.14 | 4.24 | 5.15 |
| hsa-asg-14155 | hsa-asg-14155_st2 | 5.45 | 4.22 | 3.24 | 4.68 | 3.44 | 3.40 | 3.26 |
| hsa-asg-1638 | hsa-asg-1638_st2 | 5.35 | 3.31 | 3.11 | 3.66 | 4.44 | 3.97 | 3.81 |
| hsa-asg-9666 | hsa-asg-9666_st2 | 6.37 | 4.93 | 5.54 | 3.72 | 4.48 | 5.03 | 4.85 |
| hsa-asg-2996 | hsa-asg-2996_st2 | 9.84 | 8.11 | 8.57 | 7.47 | 8.20 | 8.85 | 8.57 |
| hsa-miR-215 | hsa-miR-215_st1 | 7.42 | 6.95 | 5.77 | 5.71 | 6.66 | 5.51 | 4.79 |
| hsa-asg-12874 | hsa-asg-12874_st1 | 6.15 | 4.00 | 4.18 | 4.01 | 4.85 | 4.57 | 4.83 |
| hsa-asg-13754 | hsa-asg-13754_st2 | 5.49 | 3.42 | 4.38 | 3.04 | 4.14 | 2.86 | 4.38 |
| hsa-asg-7681 | hsa-asg-7681_st2 | 6.56 | 4.22 | 5.84 | 4.30 | 4.38 | 4.71 | 5.79 |
| hsa-asg-4027 | hsa-asg-4027_st2 | 9.53 | 7.90 | 8.48 | 7.13 | 7.76 | 8.27 | 8.47 |
| hsa-miR102 | hsa-miR102_st2 | 10.06 | 8.89 | 8.26 | 8.71 | 8.69 | 8.11 | 7.77 |
| hsa-miR-128a | hsa-miR-128a_st2 | 11.03 | 10.7 | 9.31 | 9.72 | 9.95 | 8.83 | 8.94 |
| hsa-asg-8682 | hsa-asg-8682_st2 | 6.16 | 4.22 | 4.61 | 5.09 | 4.80 | 4.11 | 4.79 |
| hsa-asg-954 | hsa-asg-954_st1 | 10.05 | 8.98 | 8.76 | 8.10 | 8.96 | 8.76 | 8.38 |
| hsa-asg-1398 | hsa-asg-1398_st2 | 6.87 | 5.31 | 5.53 | 5.33 | 5.41 | 4.49 | 4.85 |
| hsa-asg-1923 | hsa-asg-1923_st1 | 7.81 | 6.15 | 6.54 | 6.39 | 6.11 | 6.58 | 6.29 |
| hsa-asg-9164 | hsa-asg-9164_st1 | 8.84 | 6.95 | 7.88 | 6.00 | 7.03 | 7.70 | 8.17 |
| hsa-asg-7471 | hsa-asg-7471_st1 | 7.29 | 5.58 | 5.67 | 5.68 | 6.74 | 5.67 | 5.25 |
| hsa-asg-748 | hsa-asg-748_st1 | 6.32 | 5.01 | 5.97 | 3.90 | 3.94 | 5.11 | 5.00 |
| hsa-asg-9320 | hsa-asg-9320_st2 | 6.42 | 4.41 | 5.88 | 4.38 | 4.28 | 3.97 | 5.21 |
| hsa-asg-8641 | hsa-asg-8641_st1 | 7.15 | 5.01 | 6.42 | 4.61 | 5.28 | 5.70 | 6.56 |
| hsa-asg-6924 | hsa-asg-6924_st1 | 8.16 | 6.53 | 7.33 | 6.10 | 7.10 | 6.12 | 6.92 |
| hsa-asg-4100 | hsa-asg-4100_st1 | 6.63 | 4.74 | 5.25 | 5.14 | 4.62 | 5.21 | 5.57 |
| hsa-asg-1115 | hsa-asg-1115_st1 | 6.88 | 5.47 | 4.81 | 5.57 | 5.92 | 5.59 | 5.20 |
| hsa-asg-4637 | hsa-asg-4637_st1 | 8.00 | 7.08 | 6.44 | 6.38 | 6.52 | 6.47 | 6.47 |
| hsa-asg-7278 | hsa-asg-7278_st1 | 6.59 | 5.20 | 5.73 | 4.34 | 4.92 | 5.28 | 5.54 |
| hsa-asg-4031 | hsa-asg-4031_st2 | 9.55 | 8.14 | 8.64 | 7.15 | 7.73 | 8.26 | 8.27 |
| hsa-asg-8508 | hsa-asg-8508_st2 | 6.18 | 4.47 | 5.59 | 4.30 | 4.02 | 4.17 | 5.04 |
| hsa-asg-3587 | hsa-asg-3587_st1 | 6.48 | 5.24 | 5.63 | 4.25 | 5.33 | 5.58 | 5.02 |
| hsa-miR-500 | hsa-miR-500_st1 | 9.95 | 8.74 | 8.38 | 8.78 | 8.81 | 8.16 | 7.79 |
| hsa-asg-11402 | hsa-asg-11402_st1 | 7.28 | 5.93 | 5.79 | 5.37 | 6.32 | 5.40 | 5.94 |
| hsa-asg-13027 | hsa-asg-13027_st2 | 4.94 | 3.42 | 3.48 | 3.52 | 2.82 | 3.68 | 4.19 |
| hsa-miR-376a* | hsa-miR-376a-_st2 | 5.98 | 4.79 | 4.11 | 5.33 | 5.11 | 4.49 | 4.38 |
| hsa-asg-7459 | hsa-asg-7459_st2 | 7.04 | 5.13 | 6.24 | 4.54 | 5.67 | 5.44 | 5.90 |
| hsa-asg-2542 | hsa-asg-2542_st1 | 6.35 | 4.69 | 4.83 | 3.72 | 4.62 | 5.16 | 5.21 |
| hsa-asg-5740 | hsa-asg-5740_st2 | 6.58 | 5.71 | 5.74 | 4.81 | 5.31 | 5.50 | 5.11 |
| hsa-asg-9885 | hsa-asg-9885_st1 | 7.13 | 5.95 | 6.44 | 4.99 | 5.94 | 5.94 | 6.36 |
| hsa-miR-566 | hsa-miR-566_st1 | 7.30 | 6.72 | 6.12 | 5.12 | 5.83 | 6.11 | 6.10 |
| hsa-asg-6250 | hsa-asg-6250_st2 | 6.88 | 5.09 | 5.96 | 4.71 | 5.49 | 5.47 | 5.82 |
| hsa-asg-5827 | hsa-asg-5827_st2 | 6.61 | 5.61 | 4.71 | 5.71 | 5.52 | 5.65 | 5.15 |
| hsa-miR197 | hsa-miR197_st2 | 5.52 | 4.35 | 4.38 | 4.11 | 4.06 | 4.14 | 4.38 |
| hsa-asg-10335 | hsa-asg-10335_st2 | 6.47 | 5.17 | 5.49 | 5.12 | 5.29 | 5.00 | 5.20 |
| hsa-asg-11397 | hsa-asg-11397_st1 | 5.04 | 3.64 | 4.25 | 3.90 | 3.50 | 3.93 | 3.63 |
| hsa-asg-11900 | hsa-asg-11900_st1 | 7.02 | 5.34 | 6.05 | 5.37 | 5.50 | 6.18 | 5.07 |
| hsa-asg-8392 | hsa-asg-8392_st2 | 6.57 | 4.74 | 6.31 | 4.81 | 4.92 | 5.30 | 5.52 |
| hsa-asg-414 | hsa-asg-414_st1 | 7.57 | 6.27 | 6.27 | 6.66 | 6.15 | 6.01 | 6.82 |
| hsa-asg-7215 | hsa-asg-7215_st2 | 6.58 | 5.31 | 6.09 | 4.81 | 5.78 | 5.12 | 5.71 |
| hsa-asg-8344 | hsa-asg-8344_st2 | 5.67 | 4.69 | 4.31 | 3.66 | 5.26 | 4.59 | 4.70 |
| hsa-asg-13135 | hsa-asg-13135_st1 | 6.32 | 5.61 | 5.61 | 5.24 | 4.89 | 4.76 | 4.70 |
| hsa-asg-3826 | hsa-asg-3826_st2 | 5.16 | 4.74 | 3.78 | 3.90 | 3.71 | 4.20 | 4.32 |
| hsa-asg-7104 | hsa-asg-7104_st2 | 5.69 | 4.07 | 4.11 | 5.14 | 4.65 | 4.44 | 4.60 |
| hsa-asg-2584 | hsa-asg-2584_st1 | 5.10 | 4.59 | 3.48 | 3.66 | 3.71 | 4.47 | 3.81 |
| hsa-asg-4246 | hsa-asg-4246_st2 | 6.00 | 4.59 | 5.41 | 4.75 | 4.87 | 5.17 | 4.92 |
| hsa-asg-3969 | hsa-asg-3969_st1 | 7.30 | 5.88 | 6.75 | 5.57 | 5.85 | 6.35 | 6.73 |
| hsa-miR-362 | hsa-miR-362_st1 | 8.39 | 7.42 | 7.66 | 7.94 | 7.60 | 7.44 | 7.08 |
| hsa-asg-10626 | hsa-asg-10626_st2 | 5.89 | 5.13 | 5.14 | 4.61 | 5.36 | 4.96 | 4.25 |
| hsa-asg-6186 | hsa-asg-6186_st2 | 6.64 | 6.27 | 5.69 | 5.60 | 5.55 | 5.65 | 5.72 |
| hsa-asg-11729 | hsa-asg-11729_st2 | 9.13 | 8.50 | 8.40 | 8.13 | 7.84 | 8.47 | 7.83 |
| hsa-miR-584 | hsa-miR-584_st2 | 6.87 | 5.74 | 6.05 | 6.24 | 6.23 | 5.72 | 5.72 |

| | LNneg | | | | | | | | |
|---|---|---|---|---|---|---|---|---|---|
| MicroRNA | 7 | 8 | 9 | M | SD | % | ttest | log2Diff | Fold |
| hsa-asg-5638 | 1.25 | 2.74 | 3.22 | 2.51 | 0.81 | 0 | 3.28E−06 | −9.71 | 835 |
| hsa-miR-513 | 0.50 | 5.13 | 5.51 | 4.94 | 1.85 | 33 | 3.04E−03 | −8.17 | 287 |
| hsa-asg-5630 | 1.09 | 2.89 | 4.21 | 3.19 | 1.07 | 0 | 1.60E−04 | −7.47 | 177 |
| hsa-asg-1088 | 3.27 | 1.46 | 2.51 | 1.93 | 0.68 | 0 | 6.94E−06 | −7.41 | 170 |
| hsa-miR-514 | 0.93 | 2.41 | 2.07 | 1.75 | 0.53 | 0 | 1.14E−06 | −7.25 | 152 |
| hsa-asg-11338 | 3.15 | 4.12 | 5.44 | 4.38 | 0.81 | 11 | 3.20E−05 | −7.14 | 141 |
| hsa-miR-509 | 5.27 | 5.27 | 5.40 | 5.95 | 0.70 | 56 | 1.28E−05 | −6.94 | 123 |
| hsa-miR-493-5p | 4.36 | 1.85 | 4.58 | 4.66 | 1.58 | 33 | 4.31E−03 | −6.54 | 93.0 |
| hsa-asg-6283 | 4.96 | 2.14 | 1.95 | 4.19 | 1.50 | 11 | 3.40E−03 | −6.48 | 89.5 |
| hsa-asg-13404 | 2.14 | 1.09 | 2.29 | 2.82 | 1.29 | 0 | 1.60E−03 | −6.35 | 81.7 |
| hsa-miR-506 | 6.36 | 6.33 | 6.42 | 6.17 | 0.37 | 100 | 2.44E−07 | −6.27 | 77.1 |
| hsa-asg-14208 | 3.03 | 4.04 | 3.94 | 3.63 | 1.09 | 0 | 8.45E−04 | −5.97 | 62.8 |
| hsa-miR-383 | 2.62 | 2.58 | 1.36 | 2.46 | 0.71 | 0 | 4.30E−05 | −5.96 | 62.4 |
| hsa-asg-10309 | 3.91 | 3.03 | 2.29 | 4.22 | 1.45 | 33 | 4.48E−03 | −5.96 | 62.2 |
| hsa-miR-411 | 3.38 | 2.23 | 2.07 | 3.83 | 1.27 | 11 | 2.22E−03 | −5.94 | 61.5 |
| hsa-miR-493-3p | 1.96 | 1.56 | 1.71 | 1.40 | 0.73 | 0 | 6.16E−05 | −5.85 | 57.5 |
| hsa-miR-493-3p | 4.31 | 3.46 | 4.08 | 3.41 | 0.95 | 0 | 4.16E−03 | −3.99 | 15.8 |
| hsa-asg-7751 | 4.05 | 1.66 | 2.29 | 3.42 | 1.17 | 0 | 1.55E−03 | −5.78 | 55.0 |
| hsa-miR-510 | 4.52 | 4.25 | 5.07 | 4.81 | 0.32 | 11 | 1.32E−07 | −5.77 | 54.6 |
| hsa-miR-187 | 3.03 | 3.35 | 3.14 | 3.33 | 0.61 | 0 | 2.00E−05 | −5.76 | 54.2 |
| hsa-miR-508 | 5.41 | 6.11 | 6.53 | 6.17 | 0.43 | 100 | 1.38E−06 | −5.73 | 53.1 |
| hsa-asg-13922 | 4.05 | 2.23 | 1.36 | 3.87 | 1.66 | 0 | 1.19E−02 | −5.69 | 51.5 |
| hsa-miR-517a | 4.18 | 3.71 | 1.83 | 4.06 | 1.30 | 0 | 3.26E−03 | −5.66 | 50.6 |
| hsa-miR-517a | 4.05 | 3.88 | 2.51 | 4.25 | 1.23 | 22 | 2.82E−03 | −5.50 | 45.4 |
| hsa-miR-299-5p | 5.03 | 2.41 | 3.94 | 4.74 | 1.40 | 44 | 5.10E−03 | −5.64 | 49.7 |
| hsa-miR202 | 4.25 | 2.41 | 3.06 | 3.45 | 0.88 | 0 | 2.93E−04 | −5.63 | 49.4 |
| hsa-asg-9514 | 4.18 | 2.58 | 3.36 | 3.43 | 0.79 | 0 | 1.57E−04 | −5.52 | 46.0 |
| hsa-asg-9510 | 6.28 | 4.63 | 3.84 | 6.21 | 1.40 | 0 | 5.92E−03 | −5.48 | 44.7 |
| hsa-miR-487b | 4.88 | 3.71 | 4.37 | 5.58 | 1.11 | 67 | 1.61E−03 | −5.46 | 44.0 |
| hsa-asg-5617 | 1.42 | 1.46 | 1.60 | 2.78 | 1.03 | 0 | 1.06E−03 | −5.41 | 42.4 |
| hsa-asg-9512 | 6.35 | 5.27 | 5.20 | 6.23 | 1.01 | 11 | 9.89E−04 | −5.39 | 41.8 |
| hsa-miR-539 | 1.96 | 2.58 | 1.36 | 2.52 | 0.63 | 0 | 4.25E−05 | −5.35 | 40.8 |
| hsa-miR-539 | 3.48 | 1.66 | 2.07 | 2.19 | 0.63 | 0 | 5.86E−05 | −5.10 | 34.4 |
| hsa-miR-432 | 3.48 | 4.25 | 2.71 | 4.80 | 1.13 | 22 | 2.07E−03 | −5.32 | 40.0 |
| hsa-asg-7472 | 3.57 | 0.92 | 0.93 | 1.97 | 0.85 | 0 | 3.51E−04 | −5.29 | 39.2 |
| hsa-miR-495 | 5.14 | 2.41 | 4.87 | 5.23 | 1.36 | 56 | 6.20E−03 | −5.28 | 39.0 |
| hsa-asg-4037 | 2.31 | 1.85 | 2.29 | 2.51 | 0.58 | 0 | 2.53E−05 | −5.28 | 38.9 |
| hsa-asg-3081 | 3.75 | 3.88 | 1.36 | 3.99 | 1.21 | 11 | 3.25E−03 | −5.27 | 38.6 |
| hsa-asg-8486 | 3.27 | 3.29 | 2.89 | 3.24 | 0.44 | 0 | 3.07E−06 | −5.26 | 38.4 |
| hsa-miR-127 | 6.57 | 5.47 | 5.42 | 6.51 | 1.03 | 56 | 1.35E−03 | −5.23 | 37.6 |
| hsa-asg-20 | 1.42 | 2.32 | 1.48 | 2.76 | 1.20 | 0 | 3.35E−03 | −5.21 | 37.1 |
| hsa-asg-3743 | 2.14 | 2.32 | 3.89 | 3.19 | 0.68 | 0 | 9.04E−05 | −5.20 | 36.7 |
| hsa-miR-154 | 3.15 | 1.28 | 3.94 | 3.47 | 1.10 | 0 | 2.12E−03 | −5.19 | 36.4 |
| hsa-asg-5021 | 4.57 | 3.03 | 2.07 | 4.63 | 1.58 | 22 | 1.45E−02 | −5.18 | 36.2 |
| hsa-miR-369-5p | 2.90 | 2.58 | 3.50 | 3.42 | 0.81 | 0 | 3.04E−04 | −5.14 | 35.2 |
| hsa-miR-369-5p | 3.38 | 2.74 | 3.50 | 3.36 | 0.56 | 0 | 3.82E−05 | −4.82 | 28.2 |
| hsa-asg-13166 | 3.57 | 2.05 | 4.04 | 3.94 | 0.88 | 0 | 6.76E−04 | −5.00 | 32.0 |
| hsa-asg-13801 | 1.42 | 2.32 | 1.25 | 2.67 | 0.95 | 0 | 1.09E−03 | −5.00 | 32.0 |
| hsa-miR-184 | 1.60 | 3.80 | 4.13 | 4.10 | 1.09 | 11 | 2.49E−03 | −4.99 | 31.8 |
| hsa-cand443 | 4.84 | 3.80 | 4.29 | 4.59 | 0.68 | 33 | 1.21E−04 | −4.95 | 30.9 |
| hsa-miR-409-3p | 3.95 | 2.58 | 3.73 | 3.75 | 1.06 | 0 | 2.23E−03 | −4.92 | 30.2 |
| hsa-miR-134 | 4.71 | 4.29 | 5.00 | 5.16 | 0.68 | 0 | 1.39E−04 | −4.90 | 29.9 |
| hsa-asg-13254 | 4.71 | 2.41 | 3.36 | 4.86 | 1.37 | 56 | 9.54E−03 | −4.90 | 29.9 |
| hsa-miR-376a | 2.47 | 3.80 | 3.73 | 4.34 | 1.02 | 0 | 1.89E−03 | −4.88 | 29.5 |
| hsa-miR-376a | 3.83 | 4.12 | 4.64 | 4.83 | 0.75 | 11 | 3.08E−04 | −4.79 | 27.7 |
| hsa-miR-376a | 2.90 | 4.04 | 1.83 | 3.57 | 0.86 | 0 | 1.15E−03 | −4.49 | 22.5 |
| hsa-asg-1020 | 5.90 | 5.18 | 4.90 | 5.92 | 1.24 | 67 | 5.70E−03 | −4.87 | 29.3 |
| hsa-miR-487a | 0.93 | 2.23 | 2.89 | 2.50 | 0.73 | 0 | 2.43E−04 | −4.83 | 28.4 |
| hsa-miR-379 | 6.33 | 6.13 | 6.20 | 6.58 | 0.37 | 100 | 1.67E−06 | −4.81 | 28.1 |
| hsa-asg-3597 | 6.67 | 5.96 | 5.77 | 6.60 | 0.88 | 78 | 8.49E−04 | −4.80 | 27.9 |
| hsa-asg-8242 | 3.43 | 1.66 | 2.29 | 3.11 | 1.16 | 0 | 4.37E−03 | −4.79 | 27.7 |
| hsa-asg-3009 | 3.48 | 4.41 | 4.17 | 4.75 | 0.69 | 0 | 1.75E−04 | −4.76 | 27.1 |
| hsa-miR-204 | 5.17 | 5.40 | 5.76 | 6.18 | 1.00 | 44 | 1.98E−03 | −4.75 | 26.9 |
| hsa-miR-381 | 3.48 | 1.28 | 3.22 | 3.08 | 0.91 | 0 | 1.19E−03 | −4.73 | 26.5 |
| hsa-miR-520a* | 0.78 | 2.41 | 0.93 | 1.81 | 0.83 | 0 | 6.49E−04 | −4.71 | 26.2 |
| hsa-asg-1608 | 3.98 | 2.14 | 1.95 | 3.75 | 1.19 | 0 | 5.79E−03 | −4.70 | 26.0 |
| hsa-miR-368 | 5.62 | 3.97 | 5.07 | 6.25 | 1.40 | 67 | 1.31E−02 | −4.69 | 25.9 |
| hsa-miR-526a | 3.03 | 2.23 | 1.83 | 2.77 | 0.90 | 0 | 1.18E−03 | −4.68 | 25.6 |
| hsa-cand206 | 3.57 | 1.28 | 2.71 | 2.65 | 0.86 | 0 | 8.59E−04 | −4.67 | 25.5 |
| hsa-asg-3742 | 3.57 | 4.19 | 3.62 | 4.03 | 0.55 | 0 | 4.22E−05 | −4.64 | 24.9 |
| hsa-miR-202 | 3.66 | 5.46 | 4.82 | 4.84 | 0.57 | 0 | 6.06E−05 | −4.62 | 24.6 |
| hsa-miR-485-5p | 3.48 | 1.85 | 3.50 | 3.08 | 0.68 | 0 | 1.98E−04 | −4.62 | 24.6 |
| hsa-miR-518f* | 1.60 | 3.03 | 2.51 | 2.54 | 0.91 | 0 | 1.33E−03 | −4.60 | 24.3 |
| hsa-miR-494 | 5.71 | 5.84 | 6.58 | 6.68 | 0.64 | 100 | 1.42E−04 | −4.58 | 23.9 |
| hsa-miR-494 | 5.38 | 5.77 | 6.87 | 6.45 | 0.55 | 89 | 1.14E−04 | −4.07 | 16.8 |
| hsa-miR-526c | 3.15 | 2.58 | 2.07 | 2.91 | 0.99 | 0 | 2.33E−03 | −4.57 | 23.8 |
| hsa-asg-677 | 3.66 | 4.12 | 2.71 | 4.04 | 0.72 | 0 | 3.32E−04 | −4.57 | 23.7 |
| hsa-asg-5996 | 6.21 | 6.37 | 3.73 | 6.66 | 1.44 | 0 | 1.69E−02 | −4.57 | 23.7 |
| hsa-miR-520g | 3.03 | 2.89 | 2.51 | 2.77 | 0.50 | 0 | 2.52E−05 | −4.53 | 23.1 |
| hsa-asg-4756 | 1.25 | 3.23 | 1.95 | 2.83 | 0.97 | 0 | 2.14E−03 | −4.53 | 23.1 |
| hsa-miR-382 | 6.27 | 5.91 | 5.79 | 6.70 | 0.61 | 78 | 1.12E−04 | −4.53 | 23.0 |
| hsa-miR-450 | 4.18 | 4.44 | 4.04 | 3.76 | 0.62 | 0 | 1.21E−04 | −4.51 | 22.8 |
| hsa-miR-450 | 2.90 | 2.89 | 2.71 | 2.79 | 0.42 | 0 | 7.85E−06 | −4.42 | 21.4 |
| hsa-asg-12356 | 6.82 | 7.01 | 6.01 | 7.43 | 1.05 | 78 | 3.91E−03 | −4.44 | 21.8 |
| hsa-asg-8129 | 1.96 | 4.22 | 2.18 | 3.30 | 1.03 | 0 | 3.48E−03 | −4.42 | 21.4 |
| hsa-cand733 | 1.09 | 3.35 | 2.98 | 3.94 | 1.71 | 11 | 4.13E−02 | −4.39 | 21.0 |
| hsa-asg-6619 | 3.48 | 2.32 | 1.95 | 2.75 | 1.26 | 0 | 1.07E−02 | −4.38 | 20.9 |
| hsa-asg-8128 | 2.14 | 0.84 | 2.18 | 2.80 | 0.95 | 0 | 2.39E−03 | −4.38 | 20.8 |
| hsa-asg-14209 | 4.84 | 4.80 | 4.82 | 4.43 | 0.83 | 0 | 1.03E−03 | −4.38 | 20.8 |
| hsa-asg-7295 | 2.77 | 2.74 | 1.83 | 2.43 | 0.57 | 0 | 9.48E−05 | −4.33 | 20.1 |
| hsa-asg-10478 | 3.66 | 2.74 | 2.71 | 3.39 | 0.69 | 0 | 3.58E−04 | −4.31 | 19.8 |
| hsa-asg-7527 | 4.42 | 4.01 | 4.25 | 4.21 | 0.80 | 0 | 9.32E−04 | −4.28 | 19.4 |
| hsa-miR-449 | 0.93 | 1.66 | 4.70 | 2.70 | 1.37 | 0 | 1.84E−02 | −4.26 | 19.1 |
| hsa-miR-503 | 6.39 | 6.60 | 5.99 | 6.62 | 0.46 | 78 | 2.49E−05 | −4.23 | 18.8 |
| hsa-miR-503 | 6.85 | 6.87 | 6.74 | 6.87 | 0.30 | 100 | 1.88E−06 | −3.87 | 14.6 |
| hsa-cand91 | 4.22 | 4.61 | 2.71 | 4.24 | 1.11 | 0 | 6.99E−03 | −4.22 | 18.7 |
| hsa-miR-608 | 2.62 | 1.56 | 2.80 | 3.28 | 1.17 | 0 | 9.25E−03 | −4.21 | 18.5 |
| hsa-miR-135b | 3.27 | 2.23 | 2.89 | 2.57 | 0.55 | 0 | 9.18E−05 | −4.18 | 18.2 |
| hsa-miR-135b | 3.57 | 1.66 | 3.22 | 3.18 | 0.75 | 0 | 4.58E−03 | −3.09 | 8.5 |
| hsa-asg-13741 | 1.42 | 1.46 | 3.06 | 1.94 | 0.86 | 0 | 1.81E−03 | −4.17 | 18.0 |
| hsa-miR-105 | 2.47 | 2.23 | 2.71 | 1.99 | 0.71 | 0 | 5.39E−04 | −4.16 | 17.8 |
| hsa-miR-433 | 1.60 | 1.66 | 2.89 | 2.80 | 1.00 | 0 | 4.38E−03 | −4.16 | 17.8 |
| hsa-miR-377 | 0.78 | 2.74 | 2.07 | 2.32 | 0.71 | 0 | 5.65E−04 | −4.12 | 17.3 |
| hsa-miR-572 | 6.27 | 7.18 | 5.36 | 6.82 | 1.43 | 0 | 2.62E−02 | −4.11 | 17.3 |
| hsa-asg-13077 | 4.52 | 3.88 | 3.94 | 4.76 | 0.95 | 44 | 3.49E−03 | −4.11 | 17.3 |
| hsa-miR-516-5p | 2.31 | 3.61 | 3.06 | 2.84 | 0.61 | 0 | 2.25E−04 | −4.10 | 17.2 |
| hsa-miR-516-5p | 2.77 | 2.58 | 2.71 | 2.94 | 0.98 | 0 | 4.62E−03 | −4.01 | 16.1 |
| hsa-asg-9009 | 4.92 | 3.66 | 3.99 | 4.59 | 0.61 | 0 | 2.17E−04 | −4.08 | 17.0 |
| hsa-asg-3782 | 5.56 | 5.90 | 5.57 | 6.10 | 0.57 | 0 | 1.33E−04 | −4.08 | 16.9 |
| hsa-miR-409-5p | 5.90 | 5.43 | 5.24 | 5.63 | 0.58 | 44 | 1.61E−04 | −4.08 | 16.9 |
| hsa-miR-424 | 5.80 | 5.70 | 7.21 | 5.69 | 0.98 | 89 | 4.34E−03 | −4.06 | 16.7 |
| hsa-asg-1089 | 2.62 | 1.46 | 1.60 | 2.25 | 0.68 | 0 | 4.60E−04 | −4.06 | 16.7 |
| hsa-miR-485-3p | 3.57 | 2.74 | 3.06 | 3.24 | 0.66 | 0 | 3.91E−04 | −4.06 | 16.6 |
| hsa-miR-485-3p | 3.66 | 3.51 | 3.84 | 3.74 | 0.51 | 0 | 1.95E−04 | −3.50 | 11.3 |
| hsa-miR-410 | 3.15 | 1.85 | 2.51 | 2.51 | 0.68 | 0 | 4.85E−04 | −4.06 | 16.6 |
| hsa-asg-5149 | 3.66 | 4.78 | 4.90 | 4.86 | 0.51 | 0 | 6.82E−05 | −4.05 | 16.5 |
| hsa-asg-3672 | 4.57 | 4.47 | 4.48 | 5.18 | 0.80 | 11 | 1.37E−03 | −4.04 | 16.5 |
| hsa-miR-519d | 3.15 | 2.05 | 2.51 | 2.58 | 0.67 | 0 | 4.35E−04 | −4.03 | 16.4 |
| hsa-asg-1199 | 2.77 | 3.80 | 1.36 | 2.80 | 0.80 | 0 | 1.47E−03 | −4.00 | 16.1 |
| hsa-asg-1619 | 2.31 | 3.03 | 3.22 | 3.30 | 0.78 | 0 | 1.30E−03 | −3.99 | 15.9 |
| hsa-miR-329 | 3.66 | 2.74 | 3.06 | 3.16 | 0.84 | 0 | 2.06E−03 | −3.98 | 15.7 |
| hsa-miR-329 | 2.77 | 3.29 | 2.71 | 3.41 | 0.74 | 0 | 9.82E−04 | −3.92 | 15.2 |
| hsa-miR-329 | 3.98 | 2.58 | 3.50 | 3.58 | 0.59 | 0 | 4.00E−04 | −3.64 | 12.4 |
| hsa-asg-4283 | 3.48 | 2.23 | 2.51 | 3.19 | 0.65 | 0 | 4.30E−04 | −3.95 | 15.4 |
| hsa-cand930 | 2.47 | 4.08 | 4.25 | 3.53 | 0.89 | 0 | 2.96E−03 | −3.95 | 15.4 |
| hsa-asg-1881 | 3.48 | 4.22 | 4.08 | 3.98 | 0.92 | 0 | 3.70E−03 | −3.95 | 15.4 |
| hsa-miR-520h | 2.47 | 2.05 | 2.71 | 2.63 | 0.45 | 0 | 3.22E−05 | −3.92 | 15.1 |
| hsa-miR-34c | 3.48 | 3.71 | 6.83 | 3.57 | 1.38 | 11 | 2.74E−02 | −3.91 | 15.0 |
| hsa-miR-376b | 2.77 | 2.50 | 0.22 | 2.28 | 1.17 | 0 | 1.30E−02 | −3.91 | 15.0 |
| hsa-asg-9696 | 6.61 | 6.53 | 5.07 | 6.46 | 0.65 | 89 | 4.68E−04 | −3.90 | 15.0 |
| hsa-asg-13878 | 3.03 | 2.41 | 1.83 | 3.21 | 0.90 | 0 | 3.54E−03 | −3.89 | 14.8 |
| hsa-asg-3754 | 4.84 | 5.50 | 4.61 | 4.81 | 0.57 | 0 | 1.99E−04 | −3.84 | 14.4 |
| hsa-miR-515-3p | 0.78 | 1.85 | 1.83 | 1.51 | 0.50 | 0 | 8.70E−05 | −3.81 | 14.1 |
| hsa-miR-380-3p | 1.96 | 0.76 | 1.83 | 1.57 | 0.67 | 0 | 6.49E−04 | −3.81 | 14.0 |
| hsa-miR-380-3p | 1.25 | 1.28 | 2.07 | 2.00 | 0.72 | 0 | 3.98E−03 | −3.04 | 8.2 |
| hsa-cand561 | 2.77 | 3.84 | 3.99 | 3.05 | 0.96 | 0 | 5.45E−03 | −3.81 | 14.0 |
| hsa-asg-6815 | 4.25 | 5.40 | 5.20 | 5.25 | 0.74 | 22 | 1.19E−03 | −3.81 | 14.0 |
| hsa-asg-8616 | 3.83 | 2.05 | 3.06 | 3.41 | 1.02 | 0 | 7.63E−03 | −3.79 | 13.9 |
| hsa-asg-8630 | 3.57 | 4.91 | 5.62 | 5.32 | 1.14 | 22 | 1.34E−02 | −3.79 | 13.8 |
| hsa-cand150 | 2.62 | 3.97 | 4.44 | 3.60 | 1.21 | 11 | 1.88E−02 | −3.76 | 13.5 |
| hsa-asg-1203 | 3.91 | 3.71 | 1.83 | 3.70 | 0.90 | 0 | 4.24E−03 | −3.75 | 13.5 |
| hsa-asg-7159 | 3.98 | 3.40 | 2.29 | 3.35 | 0.62 | 0 | 4.56E−04 | −3.74 | 13.4 |
| hsa-asg-9262 | 3.75 | 4.08 | 4.48 | 4.46 | 0.58 | 0 | 2.71E−04 | −3.74 | 13.4 |
| hsa-asg-5606 | 1.60 | 2.66 | 2.80 | 2.65 | 0.78 | 0 | 1.96E−03 | −3.73 | 13.3 |
| hsa-asg-4872 | 2.62 | 3.88 | 3.94 | 3.56 | 0.68 | 0 | 8.78E−04 | −3.69 | 12.9 |
| hsa-asg-8893 | 4.71 | 3.46 | 4.33 | 4.70 | 0.55 | 0 | 2.31E−04 | −3.67 | 12.8 |
| hsa-asg-10947 | 3.57 | 2.58 | 2.51 | 3.32 | 0.98 | 0 | 7.40E−03 | −3.67 | 12.7 |
| hsa-asg-124 | 5.27 | 4.75 | 5.11 | 5.02 | 0.44 | 0 | 4.65E−05 | −3.64 | 12.5 |
| hsa-asg-8987 | 1.96 | 3.84 | 4.79 | 3.58 | 1.12 | 0 | 1.51E−02 | −3.64 | 12.5 |
| hsa-asg-3740 | 3.87 | 4.85 | 4.82 | 5.10 | 0.74 | 0 | 1.63E−03 | −3.61 | 12.2 |
| hsa-miR223 | 5.67 | 5.28 | 5.09 | 5.38 | 0.47 | 0 | 8.79E−05 | −3.61 | 12.2 |
| hsa-asg-7671 | 5.60 | 6.17 | 5.30 | 6.26 | 0.67 | 78 | 9.66E−04 | −3.60 | 12.1 |
| hsa-asg-12735 | 6.36 | 6.06 | 5.30 | 6.44 | 0.63 | 78 | 6.45E−04 | −3.60 | 12.1 |
| hsa-asg-8138 | 4.80 | 5.15 | 5.30 | 5.63 | 0.79 | 44 | 2.62E−03 | −3.60 | 12.1 |
| hsa-miR-520f | 2.31 | 2.41 | 3.06 | 2.16 | 0.49 | 0 | 1.18E−04 | −3.59 | 12.0 |
| hsa-miR-299-3p | 3.27 | 1.85 | 2.89 | 2.91 | 0.52 | 0 | 1.87E−04 | −3.59 | 12.0 |
| hsa-miR-299-3p | 1.60 | 3.17 | 3.50 | 2.75 | 0.78 | 0 | 2.59E−03 | −3.55 | 11.7 |
| hsa-asg-8329 | 5.49 | 5.53 | 4.41 | 5.65 | 0.77 | 56 | 2.27E−03 | −3.59 | 12.0 |
| hsa-asg-6890 | 4.15 | 4.25 | 4.44 | 4.28 | 0.24 | 0 | 5.55E−07 | −3.58 | 12.0 |
| hsa-miR-154* | 4.25 | 3.17 | 4.37 | 4.31 | 0.79 | 11 | 2.60E−03 | −3.58 | 12.0 |
| hsa-asg-1270 | 3.03 | 3.29 | 3.22 | 3.63 | 0.90 | 0 | 5.57E−03 | −3.56 | 11.8 |
| hsa-miR-487a | 3.66 | 3.71 | 3.62 | 3.72 | 0.20 | 0 | 1.62E−07 | −3.56 | 11.8 |
| hsa-asg-12531 | 2.31 | 3.17 | 4.04 | 3.21 | 0.83 | 0 | 3.75E−03 | −3.55 | 11.7 |
| hsa-miR-526b | 2.90 | 1.46 | 2.89 | 2.53 | 0.59 | 0 | 4.60E−04 | −3.54 | 11.7 |
| hsa-miR-767-5p | 2.31 | 2.05 | 2.71 | 1.93 | 0.78 | 0 | 2.64E−03 | −3.54 | 11.6 |
| hsa-asg-5741_st2 | 4.18 | 2.05 | 3.50 | 3.69 | 1.04 | 0 | 1.24E−02 | −3.51 | 11.4 |
| hsa-asg-1196 | 7.06 | 7.26 | 5.91 | 7.23 | 0.95 | 78 | 8.13E−03 | −3.50 | 11.3 |
| hsa-asg-7388 | 5.90 | 5.83 | 5.80 | 6.28 | 0.56 | 67 | 3.75E−04 | −3.48 | 11.2 |
| hsa-asg-2845 | 3.03 | 2.74 | 2.51 | 2.98 | 0.55 | 0 | 3.17E−04 | −3.48 | 11.1 |
| hsa-asg-4472 | 2.90 | 1.85 | 2.71 | 3.20 | 0.75 | 0 | 2.36E−03 | −3.48 | 11.1 |
| hsa-asg-3322 | 2.77 | 2.23 | 3.73 | 3.07 | 1.12 | 0 | 1.89E−02 | −3.46 | 11.0 |
| hsa-asg-12253 | 3.57 | 5.28 | 6.57 | 5.59 | 1.17 | 33 | 2.33E−02 | −3.46 | 11.0 |
| hsa-asg-8293 | 5.89 | 6.49 | 5.97 | 6.47 | 0.79 | 0 | 3.31E−03 | −3.45 | 10.9 |
| hsa-miR-542-5p | 3.83 | 4.66 | 5.16 | 3.81 | 0.76 | 0 | 2.59E−03 | −3.44 | 10.9 |
| hsa-asg-3185 | 2.31 | 2.50 | 3.14 | 3.78 | 1.11 | 0 | 1.97E−02 | −3.40 | 10.5 |
| hsa-asg-3406 | 3.91 | 2.32 | 3.99 | 3.44 | 0.60 | 0 | 6.76E−04 | −3.39 | 10.5 |
| hsa-asg-12515 | 3.66 | 4.12 | 3.73 | 3.98 | 0.45 | 0 | 9.72E−05 | −3.38 | 10.4 |
| hsa-cand330 | 2.62 | 3.97 | 3.94 | 4.19 | 0.80 | 11 | 3.83E−03 | −3.38 | 10.4 |
| hsa-asg-9491 | 4.12 | 4.95 | 4.17 | 4.55 | 0.45 | 0 | 9.77E−05 | −3.37 | 10.4 |
| hsa-asg-8039 | 3.98 | 4.08 | 3.79 | 3.58 | 0.49 | 0 | 1.72E−04 | −3.37 | 10.4 |
| hsa-asg-3731 | 4.50 | 4.66 | 5.28 | 5.01 | 0.73 | 0 | 2.38E−03 | −3.36 | 10.3 |
| hsa-miR-449b | 2.77 | 3.17 | 4.29 | 3.18 | 0.84 | 0 | 5.30E−03 | −3.36 | 10.2 |
| hsa-miR-654 | 3.66 | 1.56 | 4.84 | 3.89 | 1.26 | 0 | 3.59E−02 | −3.36 | 10.2 |
| hsa-miR-654 | 4.57 | 4.19 | 3.62 | 4.55 | 0.89 | 11 | 1.40E−02 | −2.92 | 7.6 |
| hsa-asg-12959 | 2.31 | 2.05 | 3.22 | 3.17 | 0.79 | 0 | 3.91E−03 | −3.35 | 10.2 |
| hsa-miR-525 | 2.77 | 1.09 | 1.83 | 1.95 | 0.76 | 0 | 3.01E−03 | −3.35 | 10.2 |
| hsa-asg-5205 | 6.68 | 7.58 | 5.36 | 7.01 | 1.14 | 44 | 2.40E−02 | −3.34 | 10.2 |
| hsa-asg-12440 | 4.42 | 4.78 | 4.54 | 4.66 | 0.38 | 0 | 3.11E−05 | −3.34 | 10.1 |
| hsa-asg-1319 | 5.38 | 5.87 | 5.09 | 5.73 | 0.46 | 11 | 1.32E−04 | −3.31 | 9.9 |
| hsa-asg-7935 | 5.19 | 5.63 | 4.64 | 5.77 | 0.92 | 0 | 9.37E−03 | −3.30 | 9.8 |
| hsa-asg-8896 | 5.36 | 4.95 | 5.09 | 4.78 | 0.54 | 0 | 4.26E−04 | −3.29 | 9.8 |
| hsa-asg-10236 | 3.15 | 3.71 | 3.36 | 3.80 | 0.68 | 0 | 1.77E−03 | −3.28 | 9.7 |
| hsa-asg-8668 | 3.57 | 2.41 | 2.07 | 3.83 | 1.09 | 0 | 2.13E−02 | −3.28 | 9.7 |
| hsa-asg-9849 | 6.11 | 6.55 | 7.02 | 6.68 | 0.74 | 89 | 3.14E−03 | −3.27 | 9.6 |
| hsa-asg-13471 | 4.36 | 4.04 | 3.50 | 4.61 | 0.61 | 11 | 9.57E−04 | −3.27 | 9.6 |
| hsa-asg-9334 | 6.22 | 6.60 | 6.85 | 6.71 | 0.50 | 89 | 2.76E−04 | −3.25 | 9.5 |
| hsa-miR-124a | 2.14 | 3.61 | 4.37 | 3.81 | 0.77 | 0 | 4.23E−03 | −3.21 | 9.2 |
| hsa-miR-124a | 2.31 | 3.40 | 4.82 | 3.54 | 0.87 | 0 | 1.07E−02 | −3.04 | 8.2 |
| hsa-asg-5265 | 6.30 | 6.40 | 5.96 | 6.53 | 0.50 | 89 | 2.91E−04 | −3.20 | 9.2 |
| hsa-asg-381 | 3.48 | 3.29 | 2.51 | 3.30 | 0.40 | 0 | 6.24E−05 | −3.19 | 9.1 |
| hsa-asg-11698 | 7.39 | 7.89 | 6.36 | 7.99 | 1.00 | 89 | 1.71E−02 | −3.15 | 8.9 |
| hsa-asg-8638 | 6.77 | 7.19 | 6.08 | 7.21 | 0.81 | 78 | 6.56E−03 | −3.13 | 8.7 |
| hsa-miR-517c | 1.42 | 2.23 | 2.07 | 2.70 | 0.70 | 0 | 2.84E−03 | −3.13 | 8.7 |
| hsa-miR-542-3p | 5.38 | 5.88 | 4.70 | 5.55 | 0.49 | 78 | 3.42E−04 | −3.10 | 8.6 |
| hsa-asg-11443 | 3.38 | 2.74 | 2.29 | 3.09 | 0.59 | 0 | 1.12E−03 | −3.09 | 8.5 |
| hsa-miR-512-3p | 3.15 | 2.41 | 4.13 | 2.84 | 0.78 | 0 | 5.42E−03 | −3.09 | 8.5 |
| hsa-asg-265 | 5.27 | 5.77 | 5.36 | 5.97 | 0.74 | 44 | 4.21E−03 | −3.08 | 8.4 |
| hsa-asg-1310 | 0.93 | 1.66 | 2.29 | 2.25 | 0.79 | 0 | 6.67E−03 | −3.04 | 8.2 |
| hsa-asg-508 | 6.32 | 6.30 | 5.40 | 6.44 | 0.74 | 78 | 4.70E−03 | −3.04 | 8.2 |
| hsa-asg-8902 | 4.52 | 4.22 | 3.29 | 4.74 | 0.90 | 22 | 1.37E−02 | −2.99 | 7.9 |
| hsa-asg-8476 | 6.75 | 5.40 | 5.61 | 6.04 | 0.47 | 11 | 3.08E−04 | −2.98 | 7.9 |
| hsa-asg-11523 | 7.18 | 7.76 | 6.81 | 8.04 | 0.77 | 100 | 6.33E−03 | −2.97 | 7.8 |
| hsa-asg-1341 | 9.34 | 10.0 | 8.05 | 9.83 | 1.03 | 89 | 2.62E−02 | −2.96 | 7.8 |
| hsa-asg-8763 | 5.52 | 6.40 | 5.18 | 6.34 | 0.86 | 67 | 1.14E−02 | −2.94 | 7.7 |
| hsa-asg-4840 | 4.62 | 4.55 | 4.37 | 4.80 | 0.61 | 11 | 1.82E−03 | −2.94 | 7.7 |
| hsa-asg-12298 | 3.27 | 3.35 | 3.89 | 4.02 | 0.57 | 0 | 1.25E−03 | −2.94 | 7.7 |
| hsa-asg-6934 | 2.77 | 3.40 | 3.22 | 3.14 | 0.70 | 0 | 4.19E−03 | −2.93 | 7.6 |
| hsa-asg-9515 | 5.10 | 5.40 | 5.79 | 5.51 | 0.41 | 33 | 1.34E−04 | −2.93 | 7.6 |
| hsa-asg-2535 | 6.37 | 7.85 | 5.64 | 7.00 | 0.94 | 33 | 1.90E−02 | −2.92 | 7.5 |
| hsa-asg-5272 | 4.36 | 5.66 | 4.61 | 5.39 | 0.82 | 0 | 1.02E−02 | −2.90 | 7.5 |
| hsa-miR-507 | 1.96 | 1.66 | 2.29 | 2.01 | 0.43 | 0 | 2.22E−04 | −2.89 | 7.4 |
| hsa-miR112 | 6.58 | 7.56 | 7.09 | 7.38 | 0.70 | 0 | 4.52E−03 | −2.89 | 7.4 |
| hsa-asg-8255 | 5.14 | 5.50 | 5.80 | 6.04 | 0.75 | 56 | 6.53E−03 | −2.89 | 7.4 |
| hsa-miR-369-3p | 3.27 | 2.97 | 1.36 | 2.53 | 0.70 | 0 | 4.59E−03 | −2.89 | 7.4 |
| hsa-asg-8446 | 4.71 | 5.70 | 5.51 | 5.54 | 0.70 | 33 | 4.30E−03 | −2.89 | 7.4 |
| hsa-asg-4654 | 7.81 | 8.16 | 6.95 | 8.40 | 0.84 | 22 | 1.12E−02 | −2.89 | 7.4 |
| hsa-miR-129 | 4.47 | 4.55 | 4.37 | 4.57 | 0.40 | 0 | 1.31E−04 | −2.88 | 7.4 |
| hsa-cand805 | 7.66 | 7.87 | 7.21 | 8.14 | 0.68 | 100 | 3.95E−03 | −2.88 | 7.4 |
| hsa-asg-11237 | 9.33 | 9.71 | 7.16 | 9.58 | 1.17 | 100 | 4.81E−02 | −2.86 | 7.3 |
| hsa-asg-3728 | 5.52 | 5.81 | 5.68 | 6.29 | 0.69 | 56 | 4.37E−03 | −2.86 | 7.3 |
| hsa-asg-758 | 5.41 | 6.52 | 4.79 | 6.03 | 0.76 | 67 | 7.41E−03 | −2.86 | 7.3 |
| hsa-asg-9269 | 2.62 | 2.23 | 3.94 | 2.96 | 0.80 | 0 | 9.78E−03 | −2.86 | 7.2 |
| hsa-miR-496 | 2.14 | 1.66 | 1.83 | 2.11 | 0.38 | 0 | 1.03E−04 | −2.83 | 7.1 |
| hsa-asg-7130 | 4.67 | 5.44 | 5.49 | 5.38 | 0.57 | 22 | 1.57E−03 | −2.82 | 7.0 |
| hsa-asg-2844 | 2.77 | 2.58 | 2.51 | 2.85 | 0.71 | 0 | 5.38E−03 | −2.81 | 7.0 |
| hsa-asg-13231 | 1.78 | 2.05 | 4.44 | 3.47 | 1.01 | 0 | 3.04E−02 | −2.80 | 7.0 |
| hsa-asg-14185 | 3.91 | 4.12 | 5.44 | 4.52 | 0.82 | 0 | 1.15E−02 | −2.80 | 7.0 |
| hsa-asg-11802 | 5.85 | 6.37 | 5.84 | 6.99 | 0.97 | 0 | 2.56E−02 | −2.80 | 6.9 |
| hsa-miR-132 | 8.00 | 8.42 | 6.86 | 8.31 | 0.74 | 89 | 7.08E−03 | −2.79 | 6.9 |
| hsa-asg-9500 | 3.15 | 4.15 | 3.68 | 3.91 | 0.48 | 0 | 5.88E−04 | −2.79 | 6.9 |
| hsa-asg-4789 | 4.05 | 4.01 | 4.84 | 4.39 | 0.71 | 0 | 6.01E−03 | −2.79 | 6.9 |
| hsa-cand287 | 2.14 | 3.51 | 2.51 | 2.83 | 0.48 | 0 | 6.15E−04 | −2.78 | 6.9 |
| hsa-asg-4392 | 9.19 | 10.0 | 7.54 | 9.60 | 1.11 | 100 | 4.67E−02 | −2.76 | 6.8 |
| hsa-asg-4438 | 4.18 | 4.80 | 5.32 | 4.61 | 0.39 | 0 | 1.50E−04 | −2.75 | 6.7 |
| hsa-asg-9513 | 5.74 | 6.45 | 6.64 | 6.13 | 0.46 | 78 | 5.06E−04 | −2.75 | 6.7 |
| hsa-asg-6292 | 7.97 | 9.26 | 7.09 | 8.74 | 1.02 | 67 | 3.39E−02 | −2.75 | 6.7 |
| hsa-asg-7376 | 2.14 | 2.41 | 3.06 | 2.59 | 0.50 | 0 | 8.74E−04 | −2.74 | 6.7 |
| hsa-asg-7048 | 4.31 | 4.01 | 5.62 | 4.76 | 0.77 | 11 | 9.63E−03 | −2.73 | 6.6 |
| hsa-asg-1239 | 4.52 | 5.55 | 6.04 | 5.53 | 0.82 | 33 | 1.37E−02 | −2.73 | 6.6 |
| hsa-asg-924 | 2.14 | 2.74 | 3.50 | 3.38 | 0.89 | 0 | 2.04E−02 | −2.72 | 6.6 |
| hsa-asg-12381 | 5.69 | 5.94 | 6.74 | 6.21 | 0.69 | 67 | 5.72E−03 | −2.70 | 6.5 |
| hsa-asg-9920 | 6.61 | 6.76 | 6.38 | 7.32 | 0.85 | 44 | 1.66E−02 | −2.70 | 6.5 |
| hsa-cand207 | 2.62 | 2.74 | 3.22 | 3.19 | 0.60 | 0 | 2.70E−03 | −2.69 | 6.4 |
| hsa-cand266 | 5.86 | 5.97 | 5.16 | 6.38 | 0.76 | 78 | 1.03E−02 | −2.69 | 6.4 |
| hsa-asg-4915 | 2.77 | 2.05 | 4.44 | 2.96 | 0.81 | 0 | 1.36E−02 | −2.69 | 6.4 |
| hsa-cand899 | 3.38 | 4.22 | 5.09 | 4.04 | 0.78 | 0 | 1.16E−02 | −2.67 | 6.3 |
| hsa-asg-9727 | 3.15 | 4.04 | 4.29 | 4.38 | 0.75 | 11 | 1.00E−02 | −2.66 | 6.3 |
| hsa-asg-11850 | 9.57 | 10.4 | 8.00 | 9.88 | 1.02 | 100 | 3.87E−02 | −2.66 | 6.3 |
| hsa-asg-14230 | 2.77 | 3.93 | 4.04 | 3.82 | 0.58 | 0 | 2.49E−03 | −2.66 | 6.3 |
| hsa-asg-8303 | 1.96 | 2.41 | 2.71 | 3.54 | 0.97 | 0 | 3.24E−02 | −2.65 | 6.3 |
| hsa-asg-7999 | 1.42 | 3.51 | 3.94 | 3.13 | 0.87 | 0 | 2.06E−02 | −2.65 | 6.3 |
| hsa-miR144 | 2.77 | 3.17 | 4.21 | 3.38 | 0.81 | 0 | 1.47E−02 | −2.63 | 6.2 |
| hsa-cand764 | 5.03 | 6.36 | 5.62 | 5.84 | 0.42 | 44 | 3.40E−04 | −2.62 | 6.2 |
| hsa-asg-7250 | 3.15 | 4.41 | 3.14 | 3.77 | 0.78 | 0 | 1.29E−02 | −2.62 | 6.1 |
| hsa-asg-4808 | 4.05 | 3.93 | 5.34 | 4.52 | 0.91 | 0 | 2.63E−02 | −2.61 | 6.1 |
| hsa-asg-7475 | 3.57 | 4.75 | 4.04 | 4.03 | 0.43 | 0 | 4.10E−04 | −2.61 | 6.1 |
| hsa-asg-6063 | 8.43 | 8.36 | 7.81 | 8.75 | 0.61 | 56 | 3.71E−03 | −2.60 | 6.1 |
| hsa-asg-4759 | 5.92 | 6.42 | 6.54 | 6.82 | 0.72 | 89 | 9.03E−03 | −2.60 | 6.1 |
| hsa-miR-520d | 3.15 | 2.41 | 3.22 | 3.00 | 0.49 | 0 | 1.07E−03 | −2.58 | 6.0 |
| hsa-asg-887 | 5.10 | 5.87 | 5.91 | 6.23 | 0.67 | 56 | 6.29E−03 | −2.58 | 6.0 |
| hsa-asg-13047 | 4.88 | 4.68 | 4.90 | 5.12 | 0.53 | 0 | 1.66E−03 | −2.57 | 6.0 |
| hsa-asg-9687 | 4.05 | 3.71 | 3.50 | 4.15 | 0.47 | 0 | 8.10E−04 | −2.57 | 6.0 |
| hsa-asg-9509 | 5.10 | 6.10 | 5.52 | 5.50 | 0.79 | 33 | 1.49E−02 | −2.57 | 6.0 |
| hsa-asg-3373 | 1.78 | 1.85 | 1.83 | 2.78 | 0.96 | 0 | 3.55E−02 | −2.55 | 5.8 |
| hsa-asg-5889 | 2.77 | 2.05 | 2.51 | 3.42 | 0.81 | 0 | 1.79E−02 | −2.55 | 5.8 |
| hsa-asg-11565 | 3.27 | 3.40 | 4.29 | 3.86 | 0.71 | 11 | 9.36E−03 | −2.54 | 5.8 |
| hsa-asg-13013 | 2.47 | 2.58 | 2.71 | 2.44 | 0.33 | 0 | 8.27E−05 | −2.53 | 5.8 |
| hsa-asg-2041 | 5.10 | 5.75 | 4.87 | 5.59 | 0.40 | 33 | 3.61E−04 | −2.49 | 5.6 |
| hsa-asg-1169 | 4.62 | 5.55 | 5.38 | 5.44 | 0.69 | 22 | 9.46E−03 | −2.48 | 5.6 |
| hsa-miR-217 | 2.77 | 2.89 | 2.71 | 3.05 | 0.46 | 0 | 8.90E−04 | −2.47 | 5.5 |
| hsa-asg-7460 | 3.03 | 2.74 | 3.84 | 3.50 | 0.82 | 0 | 2.13E−02 | −2.46 | 5.5 |
| hsa-asg-9681 | 4.05 | 3.29 | 4.51 | 4.13 | 0.75 | 0 | 1.43E−02 | −2.45 | 5.5 |
| hsa-asg-1293 | 5.49 | 5.76 | 5.34 | 6.04 | 0.52 | 56 | 2.08E−03 | −2.44 | 5.4 |
| hsa-asg-202 | 3.75 | 4.01 | 4.41 | 4.26 | 0.74 | 11 | 1.47E−02 | −2.42 | 5.4 |
| hsa-miR-522 | 2.47 | 3.40 | 2.89 | 3.05 | 0.38 | 0 | 3.21E−04 | −2.42 | 5.3 |
| hsa-asg-2074 | 2.62 | 3.17 | 2.71 | 3.05 | 0.55 | 0 | 3.03E−03 | −2.42 | 5.3 |
| hsa-asg-3614 | 3.83 | 4.73 | 4.61 | 4.49 | 0.59 | 0 | 4.75E−03 | −2.41 | 5.3 |
| hsa-asg-14176 | 5.44 | 4.19 | 4.13 | 5.46 | 0.88 | 44 | 3.12E−02 | −2.41 | 5.3 |
| hsa-asg-11977 | 5.07 | 5.44 | 5.30 | 5.89 | 0.77 | 56 | 1.77E−02 | −2.41 | 5.3 |
| hsa-asg-6234 | 9.05 | 9.49 | 8.03 | 9.69 | 0.94 | 89 | 4.27E−02 | −2.40 | 5.3 |
| hsa-asg-14006 | 4.47 | 5.33 | 4.37 | 4.78 | 0.41 | 0 | 5.65E−04 | −2.37 | 5.2 |
| hsa-cand659 | 7.49 | 7.61 | 7.81 | 7.78 | 0.25 | 100 | 2.07E−05 | −2.36 | 5.1 |
| hsa-asg-4069 | 4.12 | 3.56 | 3.89 | 4.12 | 0.67 | 0 | 1.05E−02 | −2.36 | 5.1 |
| hsa-asg-9209 | 5.74 | 6.55 | 6.38 | 6.38 | 0.39 | 67 | 4.81E−04 | −2.35 | 5.1 |
| hsa-asg-8557 | 5.84 | 5.15 | 4.84 | 5.46 | 0.45 | 0 | 1.21E−03 | −2.34 | 5.1 |
| hsa-asg-3783 | 4.42 | 5.71 | 6.54 | 5.75 | 0.95 | 33 | 4.77E−02 | −2.33 | 5.0 |
| hsa-miR-499 | 4.80 | 4.55 | 3.84 | 4.87 | 0.85 | 22 | 3.20E−02 | −2.33 | 5.0 |
| hsa-asg-9196 | 1.96 | 3.17 | 3.94 | 3.28 | 0.90 | 0 | 4.03E−02 | −2.33 | 5.0 |
| hsa-asg-4207 | 4.52 | 4.32 | 3.62 | 4.78 | 0.71 | 0 | 1.47E−02 | −2.33 | 5.0 |
| hsa-asg-11847 | 5.69 | 6.37 | 6.11 | 6.53 | 0.70 | 67 | 1.35E−02 | −2.32 | 5.0 |
| hsa-asg-7140 | 6.02 | 5.86 | 5.64 | 6.02 | 0.46 | 78 | 1.33E−03 | −2.32 | 5.0 |
| hsa-asg-1934 | 3.03 | 2.23 | 3.36 | 2.87 | 0.73 | 0 | 1.74E−02 | −2.31 | 5.0 |
| hsa-asg-6282 | 5.62 | 5.92 | 5.00 | 6.01 | 0.82 | 56 | 2.87E−02 | −2.31 | 5.0 |
| hsa-miR-370 | 4.31 | 4.47 | 5.09 | 4.84 | 0.36 | 0 | 2.85E−04 | −2.29 | 4.9 |
| hsa-asg-8636 | 5.64 | 6.60 | 6.45 | 6.14 | 0.54 | 67 | 3.71E−03 | −2.29 | 4.9 |
| hsa-asg-9143 | 6.08 | 6.69 | 6.51 | 6.87 | 0.70 | 0 | 1.45E−02 | −2.28 | 4.9 |
| hsa-asg-8280 | 5.03 | 6.30 | 4.21 | 5.18 | 0.90 | 33 | 4.40E−02 | −2.28 | 4.8 |
| hsa-asg-11992 | 6.72 | 7.78 | 6.76 | 6.99 | 0.85 | 89 | 3.42E−02 | −2.27 | 4.8 |
| hsa-asg-2311 | 3.03 | 4.87 | 4.73 | 4.66 | 0.72 | 11 | 1.71E−02 | −2.27 | 4.8 |
| hsa-asg-7170 | 3.48 | 4.44 | 3.50 | 3.91 | 0.49 | 0 | 2.35E−03 | −2.25 | 4.8 |
| hsa-asg-3168 | 2.77 | 3.29 | 2.89 | 3.13 | 0.80 | 0 | 2.87E−02 | −2.25 | 4.7 |
| hsa-asg-8404 | 3.57 | 3.40 | 4.58 | 3.60 | 0.70 | 0 | 1.66E−02 | −2.24 | 4.7 |
| hsa-miR-212 | 4.57 | 4.95 | 4.73 | 5.36 | 0.61 | 11 | 8.67E−03 | −2.24 | 4.7 |
| hsa-asg-10500 | 3.75 | 4.38 | 4.70 | 3.87 | 0.75 | 11 | 2.18E−02 | −2.23 | 4.7 |
| hsa-asg-1174 | 6.44 | 7.06 | 7.01 | 7.17 | 0.57 | 100 | 5.99E−03 | −2.21 | 4.6 |
| hsa-miR-9* | 4.92 | 4.71 | 5.20 | 5.55 | 0.53 | 44 | 4.37E−03 | −2.21 | 4.6 |
| hsa-cand705 | 2.90 | 3.17 | 1.83 | 2.63 | 0.40 | 0 | 7.61E−04 | −2.20 | 4.6 |
| hsa-asg-3376 | 2.47 | 4.19 | 3.36 | 3.82 | 0.77 | 0 | 2.78E−02 | −2.19 | 4.6 |
| hsa-asg-1966 | 3.15 | 4.71 | 4.37 | 4.50 | 0.66 | 0 | 1.45E−02 | −2.18 | 4.5 |
| hsa-asg-1621 | 5.10 | 6.68 | 7.03 | 6.48 | 0.70 | 67 | 1.88E−02 | −2.16 | 4.5 |
| hsa-asg-7465 | 5.14 | 5.20 | 5.02 | 4.86 | 0.66 | 11 | 1.53E−02 | −2.15 | 4.4 |
| hsa-asg-14066 | 5.88 | 6.19 | 6.34 | 6.55 | 0.53 | 89 | 5.03E−03 | −2.14 | 4.4 |
| hsa-asg-10883 | 6.96 | 5.72 | 6.61 | 7.13 | 0.78 | 89 | 3.33E−02 | −2.12 | 4.3 |
| hsa-asg-4439 | 2.77 | 3.71 | 4.04 | 3.31 | 0.84 | 0 | 4.41E−02 | −2.11 | 4.3 |
| hsa-miR166 | 3.98 | 4.15 | 4.84 | 4.91 | 0.64 | 0 | 1.43E−02 | −2.11 | 4.3 |
| hsa-miR219 | 3.15 | 4.63 | 4.41 | 4.32 | 0.81 | 0 | 3.85E−02 | −2.11 | 4.3 |
| hsa-asg-1168 | 5.57 | 5.55 | 5.74 | 6.00 | 0.55 | 44 | 6.74E−03 | −2.10 | 4.3 |
| hsa-asg-4597 | 6.83 | 7.30 | 6.42 | 7.49 | 0.72 | 0 | 2.52E−02 | −2.10 | 4.3 |
| hsa-miR-518c* | 3.66 | 3.71 | 4.64 | 4.02 | 0.65 | 0 | 1.60E−02 | −2.10 | 4.3 |
| hsa-miR-372 | 4.18 | 3.97 | 3.22 | 3.93 | 0.44 | 0 | 2.08E−03 | −2.09 | 4.3 |
| hsa-asg-1919 | 6.55 | 7.29 | 6.89 | 7.16 | 0.61 | 89 | 1.20E−02 | −2.09 | 4.3 |
| hsa-asg-4070 | 6.00 | 6.24 | 6.24 | 6.64 | 0.84 | 89 | 4.62E−02 | −2.08 | 4.2 |
| hsa-asg-3746 | 7.08 | 7.30 | 6.93 | 7.62 | 0.73 | 100 | 2.78E−02 | −2.08 | 4.2 |
| hsa-asg-4155 | 4.80 | 5.70 | 5.73 | 5.76 | 0.66 | 44 | 1.81E−02 | −2.07 | 4.2 |
| hsa-asg-9257 | 5.00 | 6.28 | 6.18 | 5.65 | 0.72 | 67 | 2.58E−02 | −2.06 | 4.2 |
| hsa-miR-371 | 3.83 | 3.61 | 2.89 | 3.66 | 0.37 | 0 | 7.97E−04 | −2.05 | 4.1 |
| hsa-asg-11883 | 6.11 | 4.55 | 6.42 | 6.06 | 0.64 | 78 | 1.69E−02 | −2.03 | 4.1 |
| hsa-asg-10414 | 6.56 | 7.33 | 7.55 | 7.28 | 0.75 | 89 | 3.32E−02 | −2.03 | 4.1 |
| hsa-asg-13613 | 6.98 | 7.04 | 7.12 | 7.71 | 0.74 | 100 | 3.23E−02 | −2.03 | 4.1 |
| hsa-asg-8597 | 5.55 | 5.71 | 5.56 | 5.48 | 0.31 | 0 | 2.91E−04 | −2.01 | 4.0 |
| hsa-asg-9248 | 7.43 | 8.10 | 7.13 | 8.14 | 0.72 | 100 | 3.05E−02 | −2.00 | 4.0 |
| hsa-asg-2315 | 3.66 | 4.82 | 3.89 | 4.80 | 0.71 | 0 | 2.90E−02 | −2.00 | 4.0 |
| hsa-asg-7043 | 4.67 | 4.73 | 4.84 | 4.81 | 0.70 | 0 | 2.69E−02 | −1.99 | 4.0 |
| hsa-asg-8956 | 5.00 | 5.92 | 6.08 | 6.10 | 0.77 | 56 | 4.12E−02 | −1.96 | 3.9 |
| hsa-asg-7764 | 7.82 | 8.09 | 7.66 | 8.28 | 0.68 | 11 | 2.60E−02 | −1.96 | 3.9 |
| hsa-asg-10638 | 8.31 | 8.70 | 8.51 | 8.70 | 0.58 | 100 | 1.29E−02 | −1.96 | 3.9 |
| hsa-miR-7 | 8.64 | 8.56 | 8.46 | 8.60 | 0.64 | 100 | 1.96E−02 | −1.95 | 3.9 |
| hsa-asg-3291 | 5.82 | 6.72 | 6.17 | 6.29 | 0.42 | 44 | 2.38E−03 | −1.95 | 3.9 |
| hsa-asg-1860 | 8.57 | 8.76 | 7.57 | 8.86 | 0.77 | 56 | 4.49E−02 | −1.94 | 3.8 |
| hsa-asg-6813 | 3.48 | 3.71 | 4.51 | 4.42 | 0.78 | 22 | 4.71E−02 | −1.93 | 3.8 |
| hsa-asg-11619 | 6.14 | 6.56 | 7.08 | 6.89 | 0.62 | 100 | 1.78E−02 | −1.93 | 3.8 |
| hsa-asg-13052 | 3.15 | 3.88 | 3.50 | 3.61 | 0.57 | 0 | 1.21E−02 | −1.92 | 3.8 |
| hsa-asg-1462 | 3.38 | 4.38 | 3.73 | 4.04 | 0.33 | 0 | 5.09E−04 | −1.92 | 3.8 |
| hsa-asg-5326 | 5.52 | 6.55 | 5.32 | 6.29 | 0.63 | 67 | 2.05E−02 | −1.92 | 3.8 |
| hsa-miR-660 | 7.78 | 7.90 | 8.59 | 8.51 | 0.55 | 100 | 1.12E−02 | −1.92 | 3.8 |
| hsa-miR-373 | 3.57 | 4.19 | 3.36 | 4.02 | 0.37 | 0 | 1.19E−03 | −1.91 | 3.7 |
| hsa-asg-7690 | 3.03 | 3.80 | 3.84 | 4.14 | 0.63 | 11 | 2.04E−02 | −1.90 | 3.7 |
| hsa-asg-2049 | 2.77 | 3.51 | 2.29 | 3.17 | 0.56 | 0 | 1.18E−02 | −1.90 | 3.7 |
| hsa-asg-2290 | 6.89 | 7.73 | 7.45 | 7.86 | 0.63 | 0 | 2.21E−02 | −1.88 | 3.7 |
| hsa-asg-7240 | 5.10 | 5.58 | 5.42 | 5.75 | 0.48 | 11 | 5.93E−03 | −1.87 | 3.7 |
| hsa-asg-12964 | 3.66 | 3.40 | 4.21 | 3.75 | 0.71 | 0 | 3.67E−02 | −1.87 | 3.7 |
| hsa-asg-13780 | 3.03 | 3.29 | 4.21 | 3.17 | 0.64 | 0 | 2.42E−02 | −1.87 | 3.7 |
| hsa-miR-9 | 3.48 | 3.29 | 4.13 | 3.29 | 0.55 | 0 | 1.21E−02 | −1.87 | 3.6 |
| hsa-cand208 | 1.78 | 3.97 | 2.51 | 3.03 | 0.66 | 0 | 2.88E−02 | −1.84 | 3.6 |
| hsa-asg-3073 | 5.14 | 5.77 | 5.36 | 5.51 | 0.45 | 33 | 4.75E−03 | −1.84 | 3.6 |
| hsa-asg-11155 | 6.59 | 7.12 | 6.97 | 7.48 | 0.71 | 56 | 4.09E−02 | −1.82 | 3.5 |
| hsa-asg-1617 | 6.12 | 6.70 | 7.39 | 6.97 | 0.71 | 89 | 4.33E−02 | −1.81 | 3.5 |
| hsa-asg-12069 | 6.21 | 7.32 | 7.35 | 6.91 | 0.70 | 78 | 4.09E−02 | −1.80 | 3.5 |
| hsa-miR-501 | 4.47 | 4.25 | 4.37 | 4.41 | 0.70 | 0 | 4.18E−02 | −1.80 | 3.5 |
| hsa-asg-5413 | 4.71 | 5.30 | 5.40 | 5.66 | 0.62 | 33 | 2.56E−02 | −1.79 | 3.5 |
| hsa-asg-8545 | 3.83 | 5.13 | 4.44 | 4.84 | 0.73 | 22 | 4.82E−02 | −1.78 | 3.4 |
| hsa-asg-92 | 3.83 | 4.19 | 5.11 | 4.48 | 0.61 | 11 | 2.49E−02 | −1.77 | 3.4 |
| hsa-asg-14155 | 3.75 | 3.80 | 3.36 | 3.68 | 0.49 | 0 | 9.09E−03 | −1.76 | 3.4 |
| hsa-asg-1638 | 3.48 | 2.58 | 4.04 | 3.60 | 0.55 | 0 | 1.73E−02 | −1.75 | 3.4 |
| hsa-asg-9666 | 4.05 | 5.28 | 3.79 | 4.63 | 0.66 | 0 | 3.61E−02 | −1.74 | 3.3 |
| hsa-asg-2996 | 7.68 | 8.04 | 7.43 | 8.10 | 0.51 | 0 | 1.16E−02 | −1.74 | 3.3 |
| hsa-miR-215 | 5.49 | 5.09 | 5.20 | 5.69 | 0.71 | 33 | 4.85E−02 | −1.74 | 3.3 |
| hsa-asg-12874 | 4.18 | 4.50 | 4.64 | 4.42 | 0.33 | 0 | 1.16E−03 | −1.73 | 3.3 |
| hsa-asg-13754 | 3.48 | 3.97 | 4.21 | 3.76 | 0.58 | 0 | 2.18E−02 | −1.73 | 3.3 |
| hsa-asg-7681 | 3.98 | 5.16 | 5.20 | 4.84 | 0.69 | 11 | 4.57E−02 | −1.71 | 3.3 |
| hsa-asg-4027 | 7.05 | 7.88 | 7.47 | 7.82 | 0.53 | 100 | 1.60E−02 | −1.71 | 3.3 |
| hsa-miR102 | 7.93 | 8.39 | 8.40 | 8.35 | 0.37 | 100 | 2.51E−03 | −1.71 | 3.3 |
| hsa-miR-128a | 9.00 | 8.75 | 8.66 | 9.33 | 0.70 | 100 | 4.86E−02 | −1.71 | 3.3 |
| hsa-asg-8682 | 3.75 | 4.61 | 4.21 | 4.46 | 0.42 | 0 | 4.99E−03 | −1.70 | 3.2 |
| hsa-asg-954 | 8.02 | 7.93 | 7.49 | 8.38 | 0.52 | 100 | 1.59E−02 | −1.68 | 3.2 |
| hsa-asg-1398 | 4.84 | 5.43 | 5.57 | 5.20 | 0.37 | 11 | 2.80E−03 | −1.68 | 3.2 |
| hsa-asg-1923 | 5.86 | 5.16 | 6.16 | 6.14 | 0.43 | 78 | 6.06E−03 | −1.67 | 3.2 |
| hsa-asg-9164 | 6.60 | 7.11 | 7.15 | 7.18 | 0.67 | 89 | 4.52E−02 | −1.66 | 3.2 |
| hsa-asg-7471 | 5.24 | 4.97 | 6.07 | 5.65 | 0.52 | 56 | 1.70E−02 | −1.64 | 3.1 |
| hsa-asg-748 | 4.18 | 4.55 | 4.44 | 4.68 | 0.66 | 11 | 4.76E−02 | −1.64 | 3.1 |
| hsa-asg-9320 | 4.88 | 4.80 | 5.28 | 4.79 | 0.60 | 11 | 3.29E−02 | −1.63 | 3.1 |
| hsa-asg-8641 | 4.92 | 5.65 | 5.61 | 5.53 | 0.66 | 22 | 4.68E−02 | −1.63 | 3.1 |
| hsa-asg-6924 | 6.35 | 5.96 | 6.54 | 6.55 | 0.48 | 78 | 1.24E−02 | −1.61 | 3.0 |
| hsa-asg-4100 | 4.80 | 5.09 | 4.82 | 5.03 | 0.30 | 0 | 1.03E−03 | −1.61 | 3.0 |
| hsa-asg-1115 | 5.17 | 4.75 | 5.16 | 5.29 | 0.38 | 11 | 4.12E−03 | −1.59 | 3.0 |
| hsa-asg-4637 | 6.05 | 6.48 | 5.91 | 6.42 | 0.33 | 100 | 1.80E−03 | −1.58 | 3.0 |
| hsa-asg-7278 | 3.98 | 4.73 | 5.42 | 5.02 | 0.58 | 11 | 3.22E−02 | −1.58 | 3.0 |
| hsa-asg-4031 | 7.59 | 8.44 | 7.66 | 7.99 | 0.48 | 100 | 1.51E−02 | −1.56 | 2.9 |
| hsa-asg-8508 | 4.47 | 4.50 | 5.07 | 4.62 | 0.50 | 11 | 1.91E−02 | −1.55 | 2.9 |
| hsa-asg-3587 | 4.42 | 4.35 | 4.61 | 4.94 | 0.54 | 0 | 2.61E−02 | −1.55 | 2.9 |
| hsa-miR-500 | 8.11 | 8.41 | 8.49 | 8.41 | 0.35 | 100 | 2.88E−03 | −1.54 | 2.9 |
| hsa-asg-11402 | 5.33 | 5.65 | 5.97 | 5.74 | 0.34 | 78 | 2.48E−03 | −1.54 | 2.9 |
| hsa-asg-13027 | 2.77 | 4.25 | 2.51 | 3.41 | 0.61 | 0 | 4.42E−02 | −1.54 | 2.9 |
| hsa-miR-376a* | 3.75 | 3.97 | 4.21 | 4.46 | 0.53 | 0 | 2.57E−02 | −1.52 | 2.9 |
| hsa-asg-7459 | 5.30 | 6.20 | 5.44 | 5.54 | 0.54 | 22 | 2.95E−02 | −1.50 | 2.8 |
| hsa-asg-2542 | 4.96 | 5.28 | 5.30 | 4.87 | 0.50 | 0 | 2.22E−02 | −1.48 | 2.8 |
| hsa-asg-5740 | 4.62 | 4.25 | 4.87 | 5.10 | 0.51 | 22 | 2.51E−02 | −1.47 | 2.8 |
| hsa-asg-9885 | 4.80 | 5.60 | 5.24 | 5.69 | 0.58 | 44 | 4.63E−02 | −1.44 | 2.7 |
| hsa-miR-566 | 5.55 | 6.02 | 5.42 | 5.89 | 0.47 | 56 | 2.15E−02 | −1.42 | 2.7 |
| hsa-asg-6250 | 4.80 | 5.92 | 6.01 | 5.48 | 0.50 | 0 | 2.94E−02 | −1.40 | 2.6 |
| hsa-asg-5827 | 4.76 | 5.16 | 4.70 | 5.22 | 0.42 | 22 | 1.38E−02 | −1.39 | 2.6 |
| hsa-miR197 | 3.83 | 3.51 | 4.37 | 4.13 | 0.30 | 0 | 2.16E−03 | −1.39 | 2.6 |
| hsa-asg-10335 | 4.67 | 5.07 | 4.73 | 5.08 | 0.26 | 0 | 9.15E−04 | −1.39 | 2.6 |
| hsa-asg-11397 | 3.27 | 3.51 | 3.36 | 3.66 | 0.31 | 0 | 2.97E−03 | −1.37 | 2.6 |
| hsa-asg-11900 | 6.12 | 6.22 | 5.36 | 5.69 | 0.45 | 56 | 2.23E−02 | −1.33 | 2.5 |
| hsa-asg-8392 | 5.00 | 5.51 | 5.16 | 5.25 | 0.49 | 11 | 3.34E−02 | −1.32 | 2.5 |
| hsa-asg-414 | 6.60 | 5.72 | 5.90 | 6.27 | 0.37 | 78 | 1.01E−02 | −1.30 | 2.5 |
| hsa-asg-7215 | 4.71 | 5.40 | 4.97 | 5.32 | 0.47 | 11 | 3.43E−02 | −1.26 | 2.4 |
| hsa-asg-8344 | 4.71 | 4.19 | 3.84 | 4.44 | 0.49 | 0 | 4.57E−02 | −1.23 | 2.3 |
| hsa-asg-13135 | 5.14 | 4.44 | 5.57 | 5.11 | 0.44 | 22 | 3.04E−02 | −1.21 | 2.3 |
| hsa-asg-3826 | 3.48 | 3.80 | 3.73 | 3.96 | 0.39 | 0 | 1.94E−02 | −1.20 | 2.3 |
| hsa-asg-7104 | 4.36 | 4.71 | 4.51 | 4.51 | 0.32 | 0 | 8.82E−03 | −1.18 | 2.3 |
| hsa-asg-2584 | 3.66 | 4.38 | 3.84 | 3.95 | 0.41 | 0 | 2.91E−02 | −1.15 | 2.2 |
| hsa-asg-4246 | 4.25 | 5.30 | 4.58 | 4.87 | 0.38 | 0 | 2.24E−02 | −1.12 | 2.2 |
| hsa-asg-3969 | 5.88 | 6.13 | 6.49 | 6.18 | 0.42 | 89 | 3.56E−02 | −1.12 | 2.2 |
| hsa-miR-362 | 6.93 | 6.55 | 7.04 | 7.30 | 0.43 | 100 | 4.15E−02 | −1.10 | 2.1 |
| hsa-asg-10626 | 4.84 | 4.25 | 4.97 | 4.84 | 0.39 | 0 | 3.29E−02 | −1.06 | 2.1 |
| hsa-asg-6186 | 5.07 | 5.60 | 5.20 | 5.60 | 0.34 | 44 | 1.91E−02 | −1.05 | 2.1 |
| hsa-asg-11729 | 8.00 | 8.02 | 7.68 | 8.10 | 0.30 | 78 | 1.16E−02 | −1.03 | 2.0 |
| hsa-miR-584 | 5.24 | 5.88 | 5.82 | 5.85 | 0.31 | 67 | 1.38E−02 | −1.02 | 2.0 |

SD, standard deviation;
%, percentage of samples expressing miRNA above background levels;
Log2Diff, difference in VSN-transformed expression bewteen TES and LNneg samples.

### Example 31

### miRNAs Differentally Expressed Between Normal Uterus Tissue and Normal Lymph Nodes

[0331] To identify miRNAs that may be useful markers for metastasis of cancerous uterus cells to lymph nodes, the inventors identified miRNAs that are expressed at significantly higher levels in normal uterus tissue than in cancer-negative lymph nodes.

[0332] Total RNA, purified from one normal human uterus sample (FirstChoice® Human Uterus Total RNA, cat. no. AM7892; Ambion, Austin, Tex., USA) and from nine normal human lymph node samples (FirstChoice® Human Lymph Node Total RNA, cat. no. AM7894; Ambion, Austin, Tex., USA) was purchased from Ambion. miRNA purification and labeling and microarray expression analyses were performed as described above in Example 2.

[0333] The inventors identified 120 miRNAs (64 verified, 56 predicted) with significant differential expression between the normal uterus and normal lymph nodes (|log 2Diff| uterus vs LN neg≧1 and p-value≦0.05) (Table 30). Among the verified miRNAs, 5 miRNAs (hsa-miR-411, -299-5p, -381, -495 and -204) were expressed at levels between 20- and 25-fold higher in the uterus sample; 16 miRNAs were expressed at levels between 10- and 20-fold higher in the uterus sample; and 16 miRNAs were expressed at levels between 5- and 10-fold higher in the uterus sample thann in the normal lymph nodes. Among the predicted miRNAs, hsa-asg-13404 st2 and hsa-miR202_st2 were expressed at levels between 25- and 35-fold higher in the uterus sample; 6 miRNA (hsa-asg-5021_st1, -13254 st1, -11443_st1, -5617_st1, -14065_st2 and hsa-miR144 st2) were expressed at levels between 10- and 20-fold higher in the uterus; and 14 miRNAs were expressed at levels between 5- and 10-fold higher in the uterus sample than in normal lymph nodes.

TABLE 30
MicroRNAs Differentially Expressed Between Normal Uterus (UTR) and Cancer-Negative
Lymph Node Samples (LNneg) from Patients.

| | Probe | | LNneg | | | | | |
|---|---|---|---|---|---|---|---|---|
| MicroRNA | ID | UTR | 1 | 2 | 3 | 4 | 5 | 6 |
| hsa-asg-13404 | Has-asg-13404_st2 | 7.88 | 4.15 | 2.67 | 5.28 | 2.90 | 3.24 | 1.57 |
| hsa-miR202 | Has-miR202_st2 | 8.26 | 3.83 | 2.67 | 4.93 | 3.94 | 3.59 | 2.40 |
| hsa-miR-411 | Has-miR-411_st1 | 8.44 | 4.84 | 3.68 | 4.54 | 5.22 | 5.52 | 2.94 |
| hsa-miR-299-5p | Has-miR-299-5p_st2 | 9.20 | 5.71 | 4.44 | 5.81 | 6.37 | 5.96 | 2.94 |
| hsa-miR-381 | Has-miR-381_st2 | 7.55 | 2.75 | 2.32 | 4.21 | 3.38 | 4.17 | 2.94 |
| hsa-miR-495 | Has-miR-495_st1 | 9.65 | 6.01 | 4.76 | 6.97 | 6.25 | 6.29 | 4.38 |
| hsa-miR-204 | Has-miR-204_st2 | 10.56 | 7.17 | 5.77 | 5.98 | 8.20 | 6.73 | 5.40 |
| hsa-miR-493-5p | Has-miR-493-5p_st1 | 8.97 | 4.35 | 3.78 | 6.89 | 6.18 | 6.30 | 3.63 |
| hsa-asg-5021 | Has-asg-5021_st1 | 8.89 | 5.17 | 4.38 | 7.00 | 6.05 | 5.88 | 3.48 |
| hsa-miR-189 | Has-miR-189_st1 | 9.49 | 6.07 | 5.74 | 4.93 | 7.23 | 6.15 | 4.49 |
| hsa-miR-368 | Has-miR-368_st2 | 10.36 | 6.48 | 6.47 | 7.70 | 8.08 | 7.68 | 5.18 |
| hsa-asg-13254 | Has-asg-13254_st1 | 8.95 | 5.58 | 5.32 | 6.66 | 5.89 | 5.87 | 3.97 |
| hsa-asg-11443 | Has-asg-11443_st1 | 7.17 | 4.15 | 3.58 | 2.84 | 2.66 | 3.50 | 2.65 |
| hsa-miR-383 | Has-miR-383_st1 | 6.47 | 3.31 | 2.83 | 2.40 | 2.57 | 3.18 | 1.30 |
| hsa-miR-187 | Has-miR-187_st1 | 7.31 | 4.74 | 2.75 | 2.74 | 3.75 | 3.18 | 3.32 |
| hsa-miR-9 | Has-miR-9_st2 | 7.22 | 3.42 | 3.48 | 2.84 | 3.25 | 3.59 | 2.14 |
| hsa-miR-9 | Has-cand90_st2 | 6.28 | 3.53 | 3.11 | 2.63 | 2.98 | 2.79 | 2.14 |
| hsa-miR-487b | Has-miR-487b_st2 | 9.42 | 6.05 | 5.79 | 6.97 | 6.90 | 6.22 | 5.34 |
| hsa-asg-5617 | Has-asg-5617_st1 | 6.61 | 3.73 | 3.24 | 3.90 | 3.60 | 3.40 | 2.65 |
| hsa-miR-127 | Has-miR-127_st1 | 10.28 | 6.80 | 5.52 | 7.96 | 7.53 | 7.66 | 5.66 |
| hsa-miR-133a | Has-miR-133a_st1 | 11.31 | 7.76 | 7.65 | 5.93 | 10.81 | 8.16 | 7.08 |
| hsa-asg-14065 | Has-asg-14065_st2 | 6.46 | 1.24 | 2.58 | 5.31 | 4.62 | 1.80 | 2.49 |
| hsa-miR-376a | Has-miR-376a_st2 | 8.01 | 5.13 | 4.03 | 5.49 | 5.66 | 4.82 | 3.97 |
| hsa-miR-376a | Has-asg-10049_st1 | 8.29 | 5.01 | 4.85 | 6.09 | 5.55 | 5.31 | 4.05 |
| hsa-miR-376a | Has-asg-14234_st1 | 6.86 | 3.31 | 4.25 | 3.38 | 3.98 | 4.82 | 3.63 |
| hsa-miR-424 | Has-miR-424_st1 | 9.28 | 5.79 | 6.11 | 5.53 | 5.91 | 5.75 | 3.43 |
| hsa-miR-450 | Has-asg-14228_st2 | 6.37 | 3.53 | 2.13 | 2.40 | 2.98 | 2.49 | 3.08 |
| hsa-miR-450 | hsa-miR-450_st2 | 6.92 | 4.22 | 2.67 | 2.84 | 3.89 | 3.59 | 3.97 |
| hsa-miR-582 | hsa-miR-582_st1 | 8.06 | 5.84 | 2.13 | 4.54 | 5.95 | 4.86 | 4.05 |
| hsa-miR144 | hsa-miR144_st2 | 6.87 | 4.59 | 4.38 | 2.63 | 3.38 | 2.65 | 2.65 |
| hsa-miR-9* | hsa-miR-9-_st2 | 9.03 | 6.19 | 6.05 | 5.57 | 6.10 | 5.37 | 5.81 |
| hsa-miR-299-3p | hsa-asg-10378_st1 | 6.20 | 3.64 | 3.36 | 3.21 | 1.90 | 2.41 | 1.95 |
| hsa-miR-299-3p | hsa-miR-299-3p_st2 | 5.99 | 2.41 | 3.36 | 3.38 | 2.90 | 3.40 | 2.73 |
| hsa-miR-154 | hsa-miR-154_st2 | 6.83 | 3.73 | 2.50 | 4.30 | 4.35 | 4.88 | 3.08 |
| hsa-miR-132 | hsa-miR-132_st1 | 11.65 | 9.71 | 8.51 | 8.34 | 8.34 | 8.56 | 8.02 |
| hsa-miR-101 | hsa-miR-101_st1 | 8.78 | 7.17 | 6.48 | 4.21 | 5.98 | 6.49 | 4.65 |
| hsa-asg-13284 | hsa-asg-13284_st1 | 7.13 | 4.88 | 2.03 | 3.59 | 5.83 | 4.82 | 2.80 |
| hsa-miR-379 | hsa-miR-379_st1 | 9.81 | 6.51 | 6.37 | 7.12 | 6.96 | 7.01 | 6.54 |
| hsa-cand206 | hsa-cand206_st1 | 5.88 | 2.22 | 1.94 | 3.78 | 3.60 | 2.65 | 2.14 |
| hsa-miR-134 | hsa-miR-134_st2 | 8.35 | 5.09 | 5.73 | 6.00 | 5.84 | 5.67 | 4.15 |
| hsa-asg-14176 | hsa-asg-14176_st1 | 8.64 | 6.05 | 5.67 | 5.28 | 6.77 | 6.23 | 5.37 |
| hsa-miR-432 | hsa-miR-432_st2 | 7.95 | 4.53 | 5.38 | 5.93 | 5.52 | 5.74 | 5.62 |
| hsa-asg-10202 | hsa-asg-10202_st2 | 6.24 | 4.69 | 2.03 | 3.30 | 5.24 | 3.06 | 1.95 |
| hsa-miR-149 | hsa-miR-149_st2 | 6.13 | 4.47 | 3.82 | 1.76 | 4.14 | 2.72 | 1.48 |
| hsa-asg-9696 | hsa-asg-9696_st1 | 9.45 | 7.42 | 6.31 | 6.68 | 7.04 | 6.23 | 6.22 |
| hsa-miR-19a | hsa-miR-19a_st1 | 5.76 | 4.59 | 3.36 | 2.84 | 3.12 | 3.59 | 2.49 |
| hsa-asg-10883 | hsa-asg-10883_st1 | 10.05 | 7.63 | 7.13 | 7.34 | 8.22 | 8.00 | 6.52 |
| hsa-cand660 | hsa-cand660_st1 | 5.05 | 2.22 | 1.74 | 1.37 | 1.48 | 2.65 | 1.57 |
| hsa-asg-13166 | hsa-asg-13166_st2 | 6.81 | 4.47 | 3.36 | 4.87 | 4.94 | 4.07 | 4.12 |
| hsa-miR-485-5p | hsa-miR-485-5p_st2 | 5.89 | 3.42 | 3.24 | 3.38 | 3.66 | 3.24 | 1.95 |
| hsa-asg-9514 | hsa-asg-9514_st1 | 6.22 | 2.58 | 4.50 | 3.21 | 2.48 | 4.33 | 3.63 |
| hsa-miR-369-5p | hsa-miR-369-5p_st2 | 6.16 | 3.53 | 2.67 | 4.46 | 4.35 | 4.33 | 2.49 |
| hsa-miR-369-5p | hsa-asg-1521_st1 | 5.56 | 3.73 | 3.36 | 4.01 | 2.20 | 3.68 | 3.68 |
| hsa-miR-212 | hsa-miR-212_st2 | 8.09 | 6.26 | 5.68 | 6.18 | 5.71 | 5.14 | 5.05 |
| hsa-miR-140 | hsa-miR-140_st2 | 8.74 | 7.72 | 6.11 | 6.37 | 7.21 | 6.60 | 5.45 |
| hsa-cand207 | hsa-cand207_st1 | 5.83 | 2.58 | 4.11 | 3.66 | 2.48 | 3.64 | 3.63 |
| hsa-miR-433 | hsa-miR-433_st2 | 5.37 | 2.41 | 2.67 | 4.54 | 2.90 | 4.17 | 2.32 |
| hsa-asg-3036 | hsa-asg-3036_st1 | 6.15 | 3.18 | 3.73 | 5.12 | 3.05 | 2.65 | 2.49 |
| hsa-miR-218 | hsa-miR-218_st2 | 11.24 | 9.61 | 9.22 | 8.83 | 9.68 | 9.13 | 8.59 |
| hsa-miR-660 | hsa-miR-660_st1 | 10.96 | 9.28 | 8.94 | 7.94 | 9.15 | 8.60 | 8.38 |
| hsa-miR-485-3p | hsa-miR23_st2 | 5.66 | 4.29 | 2.50 | 4.11 | 3.25 | 2.41 | 3.20 |
| hsa-asg-7465 | hsa-asg-7465_st2 | 7.27 | 4.64 | 4.31 | 4.01 | 6.17 | 5.05 | 4.15 |
| hsa-asg-6277 | hsa-asg-6277_st2 | 8.40 | 6.88 | 6.93 | 5.07 | 5.94 | 6.46 | 6.96 |
| hsa-miR-410 | hsa-miR-410_st1 | 4.89 | 2.41 | 2.32 | 1.37 | 3.71 | 2.49 | 2.80 |
| hsa-asg-12144 | hsa-asg-12144_st1 | 5.17 | 2.90 | 3.11 | 1.63 | 2.90 | 3.45 | 3.43 |
| hsa-miR-154* | hsa-miR-154-_st2 | 6.62 | 5.81 | 3.48 | 4.21 | 4.98 | 4.59 | 3.89 |
| hsa-asg-9269 | hsa-asg-9269_st2 | 5.28 | 2.58 | 2.50 | 4.68 | 2.90 | 2.57 | 2.65 |
| hsa-miR-503 | hsa-miR-503_st1 | 8.90 | 6.88 | 7.17 | 7.38 | 6.60 | 6.08 | 6.45 |
| hsa-miR-503 | hsa-miR141_st1 | 8.98 | 7.10 | 7.28 | 7.30 | 6.52 | 6.55 | 6.62 |
| hsa-miR-499 | hsa-miR12_st1 | 7.13 | 5.44 | 4.76 | 5.37 | 6.66 | 4.07 | 4.38 |
| hsa-miR-499 | hsa-miR-499_st1 | 6.86 | 5.31 | 4.61 | 4.75 | 6.57 | 4.49 | 4.12 |
| hsa-miR-339 | hsa-miR-339_st1 | 7.75 | 6.65 | 5.92 | 5.21 | 6.67 | 5.25 | 5.07 |
| hsa-miR-501 | hsa-miR-501_st1 | 6.65 | 5.24 | 4.81 | 2.84 | 5.09 | 4.04 | 4.60 |
| hsa-asg-1203 | hsa-asg-1203_st1 | 5.94 | 4.47 | 4.31 | 2.63 | 3.80 | 4.17 | 4.49 |
| hsa-miR-497 | hsa-miR43_st1 | 10.24 | 8.19 | 8.51 | 7.52 | 9.37 | 8.85 | 7.73 |
| hsa-miR-382 | hsa-miR-382_st1 | 8.85 | 7.16 | 6.80 | 7.35 | 7.13 | 7.40 | 6.51 |
| hsa-miR-542-5p | hsa-miR-542-5p_st2 | 5.94 | 3.91 | 2.83 | 3.66 | 3.60 | 3.81 | 2.80 |
| hsa-asg-12964 | hsa-asg-12964_st2 | 5.89 | 4.88 | 2.83 | 4.01 | 4.25 | 3.89 | 2.65 |
| hsa-asg-14174 | hsa-asg-14174_st1 | 4.82 | 2.90 | 2.32 | 2.63 | 3.50 | 3.68 | 2.49 |
| hsa-miR-214 | hsa-miR-214_st1 | 11.71 | 9.75 | 9.50 | 9.77 | 10.99 | 10.32 | 9.88 |
| hsa-asg-13308 | hsa-asg-13308_st2 | 11.51 | 10.57 | 9.41 | 9.59 | 9.80 | 9.15 | 8.58 |
| hsa-asg-279 | hsa-asg-279_st2 | 8.03 | 6.41 | 6.02 | 5.71 | 6.88 | 6.82 | 4.79 |
| hsa-asg-14230 | hsa-asg-14230_st1 | 5.92 | 4.29 | 3.68 | 4.38 | 4.56 | 3.29 | 3.43 |
| hsa-asg-5304 | hsa-asg-5304_st1 | 11.61 | 10.61 | 9.43 | 9.76 | 10.13 | 9.37 | 8.76 |
| hsa-miR102 | hsa-miR102_st2 | 10.40 | 8.89 | 8.26 | 8.71 | 8.69 | 8.11 | 7.77 |
| hsa-asg-13471 | hsa-asg-13471_st1 | 6.66 | 4.74 | 4.71 | 4.38 | 5.11 | 5.31 | 5.34 |
| hsa-asg-5827 | hsa-asg-5827_st2 | 7.26 | 5.61 | 4.71 | 5.71 | 5.52 | 5.65 | 5.15 |
| hsa-miR-19b | hsa-miR-19b_st2 | 9.46 | 8.37 | 8.28 | 7.32 | 8.02 | 8.01 | 6.45 |
| hsa-asg-13304 | hsa-asg-13304_st2 | 8.37 | 6.61 | 6.44 | 6.49 | 7.56 | 7.42 | 5.62 |
| hsa-asg-9687 | hsa-asg-9687_st1 | 6.09 | 4.74 | 4.76 | 3.90 | 4.65 | 3.85 | 4.19 |
| hsa-asg-6543 | hsa-asg-6543_st1 | 5.82 | 4.22 | 3.58 | 4.11 | 4.25 | 4.30 | 3.89 |
| hsa-asg-3145 | hsa-asg-3145_st1 | 7.38 | 5.66 | 5.14 | 5.28 | 6.40 | 6.22 | 5.53 |
| hsa-miR-345 | hsa-miR-345_st2 | 8.24 | 6.72 | 7.33 | 6.32 | 6.46 | 6.64 | 6.97 |
| hsa-miR-494 | hsa-miR-494_st1 | 8.57 | 6.39 | 7.25 | 7.23 | 6.95 | 6.60 | 7.61 |
| hsa-miR-500 | hsa-miR-500_st1 | 10.22 | 8.74 | 8.38 | 8.78 | 8.81 | 8.16 | 7.79 |
| hsa-miR-455 | hsa-miR-455_st1 | 6.99 | 5.81 | 4.11 | 5.81 | 6.00 | 5.67 | 4.70 |
| hsa-miR-222 | hsa-miR-222_st2 | 11.47 | 10.40 | 9.52 | 9.55 | 10.21 | 9.72 | 9.28 |
| hsa-miR-130a | hsa-cand144_st1 | 11.87 | 10.46 | 9.80 | 9.72 | 10.94 | 10.77 | 9.20 |
| hsa-miR-130a | hsa-miR-130a_st1 | 11.70 | 10.33 | 9.91 | 9.72 | 10.91 | 10.76 | 9.16 |
| hsa-miR-151 | hsa-miR-151_st2 | 11.11 | 10.19 | 9.71 | 9.15 | 9.80 | 9.35 | 9.42 |
| hsa-miR-99b | hsa-miR-99b_st1 | 12.26 | 10.99 | 10.46 | 10.53 | 11.45 | 11.14 | 10.0 |
| hsa-asg-3267 | hsa-asg-3267_st1 | 9.00 | 7.72 | 7.79 | 6.33 | 6.76 | 8.05 | 7.58 |
| hsa-asg-8673 | hsa-asg-8673_st1 | 5.20 | 3.91 | 2.50 | 3.66 | 4.32 | 3.97 | 2.80 |
| hsa-asg-10674 | hsa-asg-10674_st1 | 6.52 | 4.29 | 4.44 | 5.24 | 5.41 | 5.17 | 5.25 |
| hsa-miR-362 | hsa-miR-362_st1 | 8.97 | 7.42 | 7.66 | 7.94 | 7.60 | 7.44 | 7.08 |
| hsa-asg-14233 | hsa-asg-14233_st1 | 10.87 | 9.44 | 9.21 | 9.23 | 10.14 | 9.41 | 8.84 |
| hsa-asg-8872 | hsa-asg-8872_st1 | 8.78 | 7.85 | 7.97 | 6.91 | 6.99 | 7.39 | 7.83 |
| hsa-miR-28 | hsa-miR-28_st1 | 11.99 | 11.14 | 10.69 | 10.10 | 11.08 | 10.81 | 10.0 |
| hsa-asg-13270 | hsa-asg-13270_st2 | 5.49 | 3.91 | 3.78 | 3.78 | 4.96 | 4.57 | 4.25 |
| hsa-asg-317 | hsa-asg-317_st2 | 6.17 | 5.31 | 4.98 | 5.04 | 4.92 | 4.38 | 3.81 |
| hsa-miR-542-3p | hsa-miR-542-3p_st1 | 7.05 | 5.09 | 5.25 | 6.01 | 6.29 | 5.71 | 5.62 |
| hsa-miR257 | hsa-miR257_st1 | 10.28 | 9.61 | 9.05 | 9.23 | 9.55 | 8.84 | 8.49 |
| hsa-asg-12346 | hsa-asg-12346_st2 | 8.18 | 6.78 | 6.93 | 7.19 | 7.29 | 6.95 | 6.47 |
| hsa-asg-12515 | hsa-asg-12515_st2 | 5.44 | 4.00 | 4.25 | 3.04 | 4.10 | 4.57 | 4.32 |
| hsa-asg-10113 | hsa-asg-10113_st1 | 5.76 | 5.01 | 4.03 | 4.46 | 4.59 | 3.50 | 3.81 |
| hsa-miR-320 | hsa-miR-320_st1 | 12.27 | 11.28 | 11.14 | 11.24 | 11.40 | 11.46 | 10.7 |
| hsa-asg-9347 | hsa-asg-9347_st2 | 5.05 | 4.35 | 3.95 | 3.90 | 4.28 | 3.59 | 3.43 |
| hsa-miR-628 | hsa-miR-628_st2 | 8.98 | 8.29 | 7.83 | 7.21 | 8.00 | 7.32 | 7.47 |
| hsa-asg-7471 | hsa-asg-7471_st1 | 7.02 | 5.58 | 5.67 | 5.68 | 6.74 | 5.67 | 5.25 |
| hsa-miR-566 | hsa-miR-566_st1 | 7.25 | 6.72 | 6.12 | 5.12 | 5.83 | 6.11 | 6.10 |
| hsa-asg-11181 | hsa-asg-11181_st1 | 6.90 | 5.66 | 5.19 | 6.13 | 6.30 | 5.56 | 5.54 |
| hsa-asg-2301 | hsa-asg-2301_st2 | 8.04 | 7.01 | 6.27 | 6.73 | 7.45 | 6.92 | 6.59 |
| hsa-miR-510 | hsa-miR-510_st2 | 6.09 | 5.27 | 5.02 | 4.75 | 4.65 | 4.71 | 5.04 |
| hsa-asg-6618 | hsa-asg-6618_st2 | 6.60 | 5.47 | 5.94 | 4.50 | 5.31 | 5.71 | 6.06 |
| hsa-miR-454-3p | hsa-asg-11541_st2 | 9.20 | 8.62 | 8.26 | 8.54 | 8.45 | 7.84 | 7.87 |
| hsa-asg-4637 | hsa-asg-4637_st1 | 7.55 | 7.08 | 6.44 | 6.38 | 6.52 | 6.47 | 6.47 |
| hsa-asg-12096 | hsa-asg-12096_st2 | 5.29 | 4.64 | 3.86 | 4.11 | 4.48 | 4.07 | 4.38 |
| hsa-asg-3038 | hsa-asg-3038_st2 | 6.68 | 5.84 | 5.79 | 5.45 | 5.90 | 5.89 | 5.94 |
| hsa-miR-361 | hsa-miR-361_st2 | 12.47 | 11.73 | 11.57 | 11.28 | 12.07 | 11.67 | 11.6 |

| | LNneg | | | | | | | | |
|---|---|---|---|---|---|---|---|---|---|
| MicroRNA | 7 | 8 | 9 | M | SD | % | ttest | log2Diff | Fold |
| hsa-asg-13404 | 2.14 | 1.09 | 2.29 | 2.82 | 1.29 | 0 | 5.86E−03 | −5.06 | 33.4 |
| hsa-miR202 | 4.25 | 2.41 | 3.06 | 3.45 | 0.88 | 0 | 8.22E−04 | −4.81 | 28.0 |
| hsa-miR-411 | 3.38 | 2.23 | 2.07 | 3.83 | 1.27 | 11 | 8.92E−03 | −4.61 | 24.4 |
| hsa-miR-299-5p | 5.03 | 2.41 | 3.94 | 4.74 | 1.40 | 44 | 1.64E−02 | −4.47 | 22.1 |
| hsa-miR-381 | 3.48 | 1.28 | 3.22 | 3.08 | 0.91 | 0 | 1.69E−03 | −4.46 | 22.0 |
| hsa-miR-495 | 5.14 | 2.41 | 4.87 | 5.23 | 1.36 | 56 | 1.51E−02 | −4.42 | 21.5 |
| hsa-miR-204 | 5.17 | 5.40 | 5.76 | 6.18 | 1.00 | 44 | 3.15E−03 | −4.38 | 20.9 |
| hsa-miR-493-5p | 4.36 | 1.85 | 4.58 | 4.66 | 1.58 | 33 | 3.17E−02 | −4.32 | 19.9 |
| hsa-asg-5021 | 4.57 | 3.03 | 2.07 | 4.63 | 1.58 | 22 | 3.37E−02 | −4.26 | 19.2 |
| hsa-miR-189 | 4.92 | 3.51 | 4.92 | 5.33 | 1.09 | 44 | 6.79E−03 | −4.16 | 17.9 |
| hsa-miR-368 | 5.62 | 3.97 | 5.07 | 6.25 | 1.40 | 67 | 2.40E−02 | −4.11 | 17.2 |
| hsa-asg-13254 | 4.71 | 2.41 | 3.36 | 4.86 | 1.37 | 56 | 2.25E−02 | −4.08 | 16.9 |
| hsa-asg-11443 | 3.38 | 2.74 | 2.29 | 3.09 | 0.59 | 0 | 1.81E−04 | −4.08 | 16.9 |
| hsa-miR-383 | 2.62 | 2.58 | 1.36 | 2.46 | 0.71 | 0 | 6.53E−04 | −4.01 | 16.1 |
| hsa-miR-187 | 3.03 | 3.35 | 3.14 | 3.33 | 0.61 | 0 | 2.73E−04 | −3.98 | 15.8 |
| hsa-miR-9 | 3.48 | 3.29 | 4.13 | 3.29 | 0.55 | 0 | 1.38E−04 | −3.93 | 15.2 |
| hsa-miR-9 | 2.62 | 1.66 | 3.62 | 2.79 | 0.63 | 0 | 7.35E−04 | −3.49 | 11.3 |
| hsa-miR-487b | 4.88 | 3.71 | 4.37 | 5.58 | 1.11 | 67 | 1.11E−02 | −3.84 | 14.3 |
| hsa-asg-5617 | 1.42 | 1.46 | 1.60 | 2.78 | 1.03 | 0 | 7.64E−03 | −3.83 | 14.2 |
| hsa-miR-127 | 6.57 | 5.47 | 5.42 | 6.51 | 1.03 | 56 | 8.51E−03 | −3.77 | 13.7 |
| hsa-miR-133a | 8.20 | 6.23 | 6.46 | 7.59 | 1.47 | 89 | 4.28E−02 | −3.72 | 13.2 |
| hsa-asg-14065 | 2.90 | 1.37 | 2.40 | 2.75 | 1.39 | 0 | 3.46E−02 | −3.71 | 13.1 |
| hsa-miR-376a | 2.47 | 3.80 | 3.73 | 4.34 | 1.02 | 0 | 9.25E−03 | −3.66 | 12.7 |
| hsa-miR-376a | 3.83 | 4.12 | 4.64 | 4.83 | 0.75 | 11 | 2.39E−03 | −3.46 | 11.0 |
| hsa-miR-376a | 2.90 | 4.04 | 1.83 | 3.57 | 0.86 | 0 | 6.93E−03 | −3.29 | 9.8 |
| hsa-miR-424 | 5.80 | 5.70 | 7.21 | 5.69 | 0.98 | 89 | 8.43E−03 | −3.59 | 12.0 |
| hsa-miR-450 | 2.90 | 2.89 | 2.71 | 2.79 | 0.42 | 0 | 3.74E−05 | −3.58 | 11.9 |
| hsa-miR-450 | 4.18 | 4.44 | 4.04 | 3.76 | 0.62 | 0 | 1.28E−03 | −3.15 | 8.9 |
| hsa-miR-582 | 4.05 | 4.32 | 4.64 | 4.49 | 1.12 | 22 | 1.66E−02 | −3.58 | 11.9 |
| hsa-miR144 | 2.77 | 3.17 | 4.21 | 3.38 | 0.81 | 0 | 3.42E−03 | −3.49 | 11.2 |
| hsa-miR-9* | 4.92 | 4.71 | 5.20 | 5.55 | 0.53 | 44 | 2.65E−04 | −3.48 | 11.2 |
| hsa-miR-299-3p | 1.60 | 3.17 | 3.50 | 2.75 | 0.78 | 0 | 3.05E−03 | −3.46 | 11.0 |
| hsa-miR-299-3p | 3.27 | 1.85 | 2.89 | 2.91 | 0.52 | 0 | 5.21E−04 | −3.08 | 8.5 |
| hsa-miR-154 | 3.15 | 1.28 | 3.94 | 3.47 | 1.10 | 0 | 2.02E−02 | −3.36 | 10.3 |
| hsa-miR-132 | 8.00 | 8.42 | 6.86 | 8.31 | 0.74 | 89 | 2.63E−03 | −3.34 | 10.1 |
| hsa-miR-101 | 4.84 | 4.32 | 5.07 | 5.47 | 1.08 | 44 | 1.98E−02 | −3.31 | 9.9 |
| hsa-asg-13284 | 4.71 | 3.75 | 2.40 | 3.87 | 1.29 | 0 | 4.26E−02 | −3.26 | 9.6 |
| hsa-miR-379 | 6.33 | 6.13 | 6.20 | 6.58 | 0.37 | 100 | 3.28E−05 | −3.23 | 9.4 |
| hsa-cand206 | 3.57 | 1.28 | 2.71 | 2.65 | 0.86 | 0 | 7.38E−03 | −3.22 | 9.3 |
| hsa-miR-134 | 4.71 | 4.29 | 5.00 | 5.16 | 0.68 | 0 | 2.25E−03 | −3.18 | 9.1 |
| hsa-asg-14176 | 5.44 | 4.19 | 4.13 | 5.46 | 0.88 | 44 | 8.81E−03 | −3.18 | 9.0 |
| hsa-miR-432 | 3.48 | 4.25 | 2.71 | 4.80 | 1.13 | 22 | 2.92E−02 | −3.16 | 8.9 |
| hsa-asg-10202 | 2.47 | 3.35 | 1.71 | 3.09 | 1.22 | 0 | 4.03E−02 | −3.15 | 8.9 |
| hsa-miR-149 | 2.47 | 3.35 | 3.14 | 3.04 | 1.03 | 0 | 2.15E−02 | −3.09 | 8.5 |
| hsa-asg-9696 | 6.61 | 6.53 | 5.07 | 6.46 | 0.65 | 89 | 2.43E−03 | −3.00 | 8.0 |
| hsa-miR-19a | 1.60 | 1.28 | 2.51 | 2.82 | 1.01 | 0 | 2.50E−02 | −2.93 | 7.6 |
| hsa-asg-10883 | 6.96 | 5.72 | 6.61 | 7.13 | 0.78 | 89 | 7.50E−03 | −2.93 | 7.6 |
| hsa-cand660 | 2.77 | 2.58 | 2.71 | 2.12 | 0.58 | 0 | 1.37E−03 | −2.92 | 7.6 |
| hsa-asg-13166 | 3.57 | 2.05 | 4.04 | 3.94 | 0.88 | 0 | 1.54E−02 | −2.86 | 7.3 |
| hsa-miR-485-5p | 3.48 | 1.85 | 3.50 | 3.08 | 0.68 | 0 | 4.42E−03 | −2.81 | 7.0 |
| hsa-asg-9514 | 4.18 | 2.58 | 3.36 | 3.43 | 0.79 | 0 | 9.81E−03 | −2.79 | 6.9 |
| hsa-miR-369-5p | 2.90 | 2.58 | 3.50 | 3.42 | 0.81 | 0 | 1.21E−02 | −2.74 | 6.7 |
| hsa-miR-369-5p | 3.38 | 2.74 | 3.50 | 3.36 | 0.56 | 0 | 5.91E−03 | −2.20 | 4.6 |
| hsa-miR-212 | 4.57 | 4.95 | 4.73 | 5.36 | 0.61 | 11 | 2.95E−03 | −2.73 | 6.6 |
| hsa-miR-140 | 4.76 | 4.75 | 5.24 | 6.02 | 1.05 | 44 | 4.04E−02 | −2.71 | 6.6 |
| hsa-cand207 | 2.62 | 2.74 | 3.22 | 3.19 | 0.60 | 0 | 3.01E−03 | −2.64 | 6.2 |
| hsa-miR-433 | 1.60 | 1.66 | 2.89 | 2.80 | 1.00 | 0 | 4.08E−02 | −2.58 | 6.0 |
| hsa-asg-3036 | 3.27 | 4.73 | 4.67 | 3.65 | 0.96 | 0 | 3.97E−02 | −2.50 | 5.6 |
| hsa-miR-218 | 7.75 | 7.43 | 8.74 | 8.77 | 0.77 | 100 | 1.59E−02 | −2.47 | 5.5 |
| hsa-miR-660 | 7.78 | 7.90 | 8.59 | 8.51 | 0.55 | 100 | 3.01E−03 | −2.45 | 5.5 |
| hsa-miR-485-3p | 3.57 | 2.74 | 3.06 | 3.24 | 0.66 | 0 | 8.27E−03 | −2.42 | 5.4 |
| hsa-asg-7465 | 5.14 | 5.20 | 5.02 | 4.86 | 0.66 | 11 | 8.70E−03 | −2.42 | 5.3 |
| hsa-asg-6277 | 4.92 | 6.32 | 4.54 | 6.00 | 0.94 | 67 | 4.17E−02 | −2.39 | 5.3 |
| hsa-miR-410 | 3.15 | 1.85 | 2.51 | 2.51 | 0.68 | 0 | 1.07E−02 | −2.38 | 5.2 |
| hsa-asg-12144 | 3.48 | 2.05 | 2.51 | 2.83 | 0.65 | 0 | 9.33E−03 | −2.34 | 5.1 |
| hsa-miR-154* | 4.25 | 3.17 | 4.37 | 4.31 | 0.79 | 11 | 2.39E−02 | −2.31 | 5.0 |
| hsa-asg-9269 | 2.62 | 2.23 | 3.94 | 2.96 | 0.80 | 0 | 2.60E−02 | −2.31 | 5.0 |
| hsa-miR-503 | 6.39 | 6.60 | 5.99 | 6.62 | 0.46 | 78 | 1.61E−03 | −2.28 | 4.9 |
| hsa-miR-503 | 6.85 | 6.87 | 6.74 | 6.87 | 0.30 | 100 | 1.62E−04 | −2.11 | 4.3 |
| hsa-miR-499 | 4.80 | 4.55 | 3.84 | 4.87 | 0.85 | 22 | 3.62E−02 | −2.26 | 4.8 |
| hsa-miR-499 | 5.03 | 4.25 | 4.58 | 4.86 | 0.74 | 22 | 3.34E−02 | −2.00 | 4.0 |
| hsa-miR-339 | 5.00 | 4.22 | 5.42 | 5.49 | 0.80 | 33 | 2.76E−02 | −2.26 | 4.8 |
| hsa-miR-501 | 4.47 | 4.25 | 4.37 | 4.41 | 0.70 | 0 | 1.65E−02 | −2.24 | 4.7 |
| hsa-asg-1203 | 3.91 | 3.71 | 1.83 | 3.70 | 0.90 | 0 | 4.63E−02 | −2.24 | 4.7 |
| hsa-miR-497 | 7.44 | 7.11 | 7.81 | 8.06 | 0.73 | 89 | 2.25E−02 | −2.18 | 4.5 |
| hsa-miR-382 | 6.27 | 5.91 | 5.79 | 6.70 | 0.61 | 78 | 1.05E−02 | −2.15 | 4.4 |
| hsa-miR-542-5p | 3.83 | 4.66 | 5.16 | 3.81 | 0.76 | 0 | 2.82E−02 | −2.14 | 4.4 |
| hsa-asg-12964 | 3.66 | 3.40 | 4.21 | 3.75 | 0.71 | 0 | 2.14E−02 | −2.13 | 4.4 |
| hsa-asg-14174 | 2.77 | 1.46 | 2.51 | 2.70 | 0.65 | 0 | 1.48E−02 | −2.13 | 4.4 |
| hsa-miR-214 | 9.26 | 8.43 | 8.50 | 9.60 | 0.81 | 100 | 3.89E−02 | −2.11 | 4.3 |
| hsa-asg-13308 | 9.50 | 8.95 | 9.09 | 9.41 | 0.57 | 100 | 8.19E−03 | −2.11 | 4.3 |
| hsa-asg-279 | 5.31 | 5.27 | 6.14 | 5.93 | 0.72 | 0 | 2.44E−02 | −2.10 | 4.3 |
| hsa-asg-14230 | 2.77 | 3.93 | 4.04 | 3.82 | 0.58 | 0 | 9.00E−03 | −2.10 | 4.3 |
| hsa-asg-5304 | 9.57 | 9.06 | 9.14 | 9.54 | 0.57 | 100 | 8.65E−03 | −2.07 | 4.2 |
| hsa-miR102 | 7.93 | 8.39 | 8.40 | 8.35 | 0.37 | 100 | 8.24E−04 | −2.05 | 4.1 |
| hsa-asg-13471 | 4.36 | 4.04 | 3.50 | 4.61 | 0.61 | 11 | 1.31E−02 | −2.05 | 4.1 |
| hsa-asg-5827 | 4.76 | 5.16 | 4.70 | 5.22 | 0.42 | 22 | 1.73E−03 | −2.04 | 4.1 |
| hsa-miR-19b | 6.90 | 6.51 | 7.18 | 7.45 | 0.74 | 100 | 3.31E−02 | −2.02 | 4.0 |
| hsa-asg-13304 | 6.33 | 4.97 | 6.20 | 6.41 | 0.80 | 67 | 4.82E−02 | −1.96 | 3.9 |
| hsa-asg-9687 | 4.05 | 3.71 | 3.50 | 4.15 | 0.47 | 0 | 4.31E−03 | −1.94 | 3.8 |
| hsa-asg-6543 | 3.48 | 3.71 | 3.36 | 3.88 | 0.36 | 0 | 8.88E−04 | −1.94 | 3.8 |
| hsa-asg-3145 | 4.96 | 4.44 | 5.32 | 5.44 | 0.61 | 33 | 1.63E−02 | −1.94 | 3.8 |
| hsa-miR-345 | 5.10 | 5.32 | 6.13 | 6.33 | 0.73 | 78 | 3.71E−02 | −1.91 | 3.8 |
| hsa-miR-494 | 5.71 | 5.84 | 6.58 | 6.68 | 0.64 | 100 | 2.37E−02 | −1.88 | 3.7 |
| hsa-miR-500 | 8.11 | 8.41 | 8.49 | 8.41 | 0.35 | 100 | 1.11E−03 | −1.81 | 3.5 |
| hsa-miR-455 | 5.07 | 5.30 | 4.58 | 5.23 | 0.66 | 33 | 3.42E−02 | −1.77 | 3.4 |
| hsa-miR-222 | 9.50 | 9.37 | 9.84 | 9.71 | 0.38 | 100 | 2.27E−03 | −1.77 | 3.4 |
| hsa-miR-130a | 9.99 | 9.54 | 10.5 | 10.1 | 0.60 | 100 | 2.38E−02 | −1.76 | 3.4 |
| hsa-miR-130a | 10.03 | 9.61 | 10.4 | 10.1 | 0.57 | 100 | 2.86E−02 | −1.60 | 3.0 |
| hsa-miR-151 | 9.02 | 8.50 | 9.03 | 9.35 | 0.50 | 100 | 1.06E−02 | −1.76 | 3.4 |
| hsa-miR-99b | 10.15 | 9.51 | 10.3 | 10.5 | 0.60 | 100 | 2.46E−02 | −1.74 | 3.3 |
| hsa-asg-3267 | 6.67 | 7.76 | 6.70 | 7.26 | 0.64 | 0 | 3.25E−02 | −1.74 | 3.3 |
| hsa-asg-8673 | 3.75 | 3.03 | 3.50 | 3.49 | 0.60 | 0 | 2.65E−02 | −1.71 | 3.3 |
| hsa-asg-10674 | 4.71 | 4.32 | 4.64 | 4.83 | 0.44 | 0 | 6.60E−03 | −1.69 | 3.2 |
| hsa-miR-362 | 6.93 | 6.55 | 7.04 | 7.30 | 0.43 | 100 | 6.04E−03 | −1.67 | 3.2 |
| hsa-asg-14233 | 9.03 | 8.85 | 8.87 | 9.23 | 0.41 | 100 | 5.63E−03 | −1.64 | 3.1 |
| hsa-asg-8872 | 6.21 | 7.06 | 6.34 | 7.17 | 0.64 | 89 | 4.57E−02 | −1.61 | 3.0 |
| hsa-miR-28 | 10.10 | 9.38 | 10.5 | 10.4 | 0.57 | 100 | 3.21E−02 | −1.56 | 2.9 |
| hsa-asg-13270 | 3.48 | 3.80 | 3.06 | 3.95 | 0.57 | 0 | 3.40E−02 | −1.53 | 2.9 |
| hsa-asg-317 | 3.91 | 4.41 | 5.07 | 4.65 | 0.54 | 33 | 2.79E−02 | −1.52 | 2.9 |
| hsa-miR-542-3p | 5.38 | 5.88 | 4.70 | 5.55 | 0.49 | 78 | 2.01E−02 | −1.51 | 2.8 |
| hsa-miR257 | 8.48 | 8.13 | 7.89 | 8.81 | 0.61 | 100 | 4.96E−02 | −1.48 | 2.8 |
| hsa-asg-12346 | 6.20 | 6.30 | 6.25 | 6.71 | 0.42 | 22 | 9.87E−03 | −1.47 | 2.8 |
| hsa-asg-12515 | 3.66 | 4.12 | 3.73 | 3.98 | 0.45 | 0 | 1.47E−02 | −1.47 | 2.8 |
| hsa-asg-10113 | 4.71 | 3.97 | 4.87 | 4.33 | 0.52 | 11 | 3.17E−02 | −1.43 | 2.7 |
| hsa-miR-320 | 10.45 | 10.17 | 10.0 | 10.8 | 0.55 | 100 | 4.43E−02 | −1.39 | 2.6 |
| hsa-asg-9347 | 3.03 | 2.74 | 3.62 | 3.66 | 0.54 | 0 | 3.94E−02 | −1.39 | 2.6 |
| hsa-miR-628 | 7.23 | 7.64 | 7.43 | 7.60 | 0.37 | 100 | 7.90E−03 | −1.38 | 2.6 |
| hsa-asg-7471 | 5.24 | 4.97 | 6.07 | 5.65 | 0.52 | 56 | 3.64E−02 | −1.37 | 2.6 |
| hsa-miR-566 | 5.55 | 6.02 | 5.42 | 5.89 | 0.47 | 56 | 2.55E−02 | −1.36 | 2.6 |
| hsa-asg-11181 | 5.33 | 5.03 | 5.18 | 5.55 | 0.43 | 11 | 1.78E−02 | −1.35 | 2.6 |
| hsa-asg-2301 | 6.44 | 6.22 | 6.76 | 6.71 | 0.39 | 100 | 1.18E−02 | −1.33 | 2.5 |
| hsa-miR-510 | 4.52 | 4.25 | 5.07 | 4.81 | 0.32 | 11 | 5.01E−03 | −1.28 | 2.4 |
| hsa-asg-6618 | 4.92 | 5.18 | 5.22 | 5.37 | 0.49 | 22 | 4.52E−02 | −1.23 | 2.3 |
| hsa-miR-454-3p | 7.89 | 7.31 | 7.80 | 8.06 | 0.43 | 100 | 3.66E−02 | −1.14 | 2.2 |
| hsa-asg-4637 | 6.05 | 6.48 | 5.91 | 6.42 | 0.33 | 100 | 1.16E−02 | −1.12 | 2.2 |
| hsa-asg-12096 | 4.12 | 3.88 | 4.29 | 4.20 | 0.26 | 0 | 4.43E−03 | −1.08 | 2.1 |
| hsa-asg-3038 | 5.38 | 5.13 | 5.61 | 5.66 | 0.28 | 44 | 8.97E−03 | −1.02 | 2.0 |
| hsa-miR-361 | 11.12 | 10.91 | 11.1 | 11.4 | 0.37 | 100 | 3.19E−02 | −1.01 | 2.0 |

SD, standard deviation;
%, percentage of samples expressing miRNA above background levels;
Log2Diff, difference in VSN-transformed expression bewteen UTR and LNneg samples.

### Example 32

### miRNAs Differentally Expressed Between Normal Spleen Tissue and Normal Lymph Nodes

[0334] To identify miRNAs that may be useful markers for metastasis of cancerous spleen cells to lymph nodes, the inventors identified miRNAs that are expressed at significantly higher levels in normal spleen tissue than in cancer-negative lymph nodes.

[0335] Total RNA, purified from one normal human spleen sample (FirstChoice® Human Spleen Total RNA, cat. no. AM7970 Ambion, Austin, Tex., USA) and from nine normal human lymph node samples (FirstChoice® Human Lymph Node Total RNA, cat. no. AM7894; Ambion, Austin, Tex., USA) was purchased from Ambion. miRNA purification and labeling and microarray expression analyses were performed as described above in Example 2.

[0336] The inventors identified 133 miRNAs (67 verified, 66 predicted) with significant differential expression between the normal spleen and normal lymph node samples (|log 2Diff| spleen vs LN neg≧1 and p-value<0.05) (Table 31). Among the verified miRNAs, 7 miRNAs (hsa-miR-495, -493-5p, -493-3p, 338, -368, -487b and -139) were expressed at levels between 20- and 50-fold higher in the spleen sample; 17 miRNAs were expressed at levels between 10- and 20-fold higher in spleen; and 18 miRNAs were expressed at levels between 5- and 10-fold higher in the spleen sample than in normal lymph nodes. Among the predicted miRNAs, 3 miRNAs (hsa-asg-13404_st2, 13166_st2 and hsa-miR202 st2) were expressed at levels between 20- and 40-fold higher in the spleen sample; 9 miRNAs were expressed at levels between 10- and 20-fold higher in spleen; and 9 miRNAs were expressed at levels between 5- and 10-fold higher in the spleen sample than in normal lymph nodes.

TABLE 31
MicroRNAs Differentially Expressed Between Normal Spleen (SPL) and Cancer-Negative
Lymph Node Samples (LNneg) from Patients.

| | Probe | | LNneg | | | | | |
|---|---|---|---|---|---|---|---|---|
| MicroRNA | ID | SPL | 1 | 2 | 3 | 4 | 5 | 6 |
| hsa-miR-495 | hsa-miR-495_st1 | 10.60 | 6.01 | 4.76 | 6.97 | 6.25 | 6.29 | 4.38 |
| hsa-miR-493-5p | hsa-miR-493-5p_st1 | 9.88 | 4.35 | 3.78 | 6.89 | 6.18 | 6.30 | 3.63 |
| hsa-asg-13404 | hsa-asg-13404_st2 | 7.94 | 4.15 | 2.67 | 5.28 | 2.90 | 3.24 | 1.57 |
| hsa-miR-493-3p | hsa-asg-8480_st1 | 6.31 | 0.56 | 0.57 | 2.74 | 1.48 | 1.35 | 0.64 |
| hsa-miR-493-3p | hsa-miR-493-3p_st1 | 6.65 | 4.64 | 3.05 | 4.06 | 2.98 | 2.24 | 1.86 |
| hsa-miR-338 | hsa-miR-338_st1 | 9.10 | 5.09 | 4.03 | 5.57 | 4.85 | 4.00 | 2.14 |
| hsa-miR-368 | hsa-miR-368_st2 | 10.98 | 6.48 | 6.47 | 7.70 | 8.08 | 7.68 | 5.18 |
| hsa-miR202 | hsa-miR202_st2 | 8.13 | 3.83 | 2.67 | 4.93 | 3.94 | 3.59 | 2.40 |
| hsa-miR-487b | hsa-miR-487b_st2 | 10.14 | 6.05 | 5.79 | 6.97 | 6.90 | 6.22 | 5.34 |
| hsa-asg-13166 | hsa-asg-13166_st2 | 8.49 | 4.47 | 3.36 | 4.87 | 4.94 | 4.07 | 4.12 |
| hsa-miR-139 | hsa-miR-139_st2 | 13.32 | 10.99 | 9.36 | 9.56 | 9.74 | 8.42 | 8.94 |
| hsa-miR-376a | hsa-miR-376a_st2 | 8.74 | 5.13 | 4.03 | 5.49 | 5.66 | 4.82 | 3.97 |
| hsa-miR-376a | hsa-asg-14234_st1 | 7.80 | 3.31 | 4.25 | 3.38 | 3.98 | 4.82 | 3.63 |
| hsa-miR-411 | hsa-miR-411_st1 | 8.08 | 4.84 | 3.68 | 4.54 | 5.22 | 5.52 | 2.94 |
| hsa-miR-539 | hsa-miR-539_st1 | 6.70 | 2.03 | 3.11 | 2.63 | 3.38 | 2.65 | 2.94 |
| hsa-miR-539 | hsa-miR177_st1 | 6.35 | 2.58 | 2.50 | 1.37 | 2.39 | 1.80 | 1.86 |
| hsa-miR-376a | hsa-asg-10049_st1 | 8.99 | 5.01 | 4.85 | 6.09 | 5.55 | 5.31 | 4.05 |
| hsa-asg-5021 | hsa-asg-5021_st1 | 8.78 | 5.17 | 4.38 | 7.00 | 6.05 | 5.88 | 3.48 |
| hsa-miR-432 | hsa-miR-432_st2 | 8.93 | 4.53 | 5.38 | 5.93 | 5.52 | 5.74 | 5.62 |
| hsa-miR-424 | hsa-miR-424_st1 | 9.80 | 5.79 | 6.11 | 5.53 | 5.91 | 5.75 | 3.43 |
| hsa-asg-5617 | hsa-asg-5617_st1 | 6.88 | 3.73 | 3.24 | 3.90 | 3.60 | 3.40 | 2.65 |
| hsa-miR-409-3p | hsa-miR-409-3p_st1 | 7.74 | 2.22 | 3.42 | 5.14 | 4.98 | 4.73 | 2.94 |
| hsa-miR-369-5p | hsa-asg-1521_st1 | 7.32 | 3.73 | 3.36 | 4.01 | 2.20 | 3.68 | 3.68 |
| hsa-miR-369-5p | hsa-miR-369-5p_st2 | 7.14 | 3.53 | 2.67 | 4.46 | 4.35 | 4.33 | 2.49 |
| hsa-asg-13254 | hsa-asg-13254_st1 | 8.82 | 5.58 | 5.32 | 6.66 | 5.89 | 5.87 | 3.97 |
| hsa-miR-381 | hsa-miR-381_st2 | 6.98 | 2.75 | 2.32 | 4.21 | 3.38 | 4.17 | 2.94 |
| hsa-miR-450 | hsa-miR-450_st2 | 7.66 | 4.22 | 2.67 | 2.84 | 3.89 | 3.59 | 3.97 |
| hsa-miR-450 | hsa-asg-14228_st2 | 6.54 | 3.53 | 2.13 | 2.40 | 2.98 | 2.49 | 3.08 |
| hsa-cand26 | hsa-cand26_st2 | 8.88 | 6.11 | 5.56 | 6.04 | 4.06 | 3.64 | 4.70 |
| hsa-miR-127 | hsa-miR-127_st1 | 10.33 | 6.80 | 5.52 | 7.96 | 7.53 | 7.66 | 5.66 |
| hsa-asg-10881 | hsa-asg-10881_st1 | 8.98 | 5.71 | 4.98 | 6.06 | 5.43 | 4.76 | 5.40 |
| hsa-asg-13135 | hsa-asg-13135_st1 | 8.87 | 5.61 | 5.61 | 5.24 | 4.89 | 4.76 | 4.70 |
| hsa-miR-410 | hsa-miR-410_st1 | 6.27 | 2.41 | 2.32 | 1.37 | 3.71 | 2.49 | 2.80 |
| hsa-miR-485-3p | hsa-miR23_st2 | 6.93 | 4.29 | 2.50 | 4.11 | 3.25 | 2.41 | 3.20 |
| hsa-miR-485-3p | hsa-miR-485-3p_st2 | 6.74 | 3.64 | 2.97 | 4.30 | 4.41 | 4.24 | 3.08 |
| hsa-asg-7472 | hsa-asg-7472_st2 | 5.63 | 1.63 | 2.13 | 1.89 | 2.00 | 2.86 | 1.76 |
| hsa-miR-487a | hsa-miR-487a_st2 | 6.14 | 2.22 | 2.83 | 2.63 | 3.38 | 2.16 | 3.20 |
| hsa-miR-487a | hsa-asg-6915_st1 | 6.12 | 4.07 | 3.58 | 3.90 | 3.38 | 3.85 | 3.72 |
| hsa-miR-376b | hsa-miR-376b_st1 | 5.85 | 1.83 | 2.13 | 4.11 | 3.32 | 2.65 | 1.03 |
| hsa-cand206 | hsa-cand206_st1 | 6.19 | 2.22 | 1.94 | 3.78 | 3.60 | 2.65 | 2.14 |
| hsa-miR-154 | hsa-miR-154_st2 | 6.86 | 3.73 | 2.50 | 4.30 | 4.35 | 4.88 | 3.08 |
| hsa-miR-542-5p | hsa-miR-542-5p_st2 | 7.19 | 3.91 | 2.83 | 3.66 | 3.60 | 3.81 | 2.80 |
| hsa-miR-542-3p | hsa-miR-542-3p_st1 | 8.91 | 5.09 | 5.25 | 6.01 | 6.29 | 5.71 | 5.62 |
| hsa-asg-8067 | hsa-asg-8067_st2 | 9.32 | 6.66 | 6.35 | 5.82 | 6.62 | 6.65 | 5.69 |
| hsa-miR-134 | hsa-miR-134_st2 | 8.50 | 5.09 | 5.73 | 6.00 | 5.84 | 5.67 | 4.15 |
| hsa-miR-379 | hsa-miR-379_st1 | 9.83 | 6.51 | 6.37 | 7.12 | 6.96 | 7.01 | 6.54 |
| hsa-miR-329 | hsa-miR-329_st1 | 6.60 | 3.73 | 2.97 | 4.61 | 3.25 | 4.54 | 2.80 |
| hsa-miR-494 | hsa-miR-494_st1 | 9.86 | 6.39 | 7.25 | 7.23 | 6.95 | 6.60 | 7.61 |
| hsa-miR-494 | hsa-miR61_st2 | 9.15 | 6.81 | 6.50 | 6.86 | 6.42 | 6.35 | 7.05 |
| hsa-asg-9696 | hsa-asg-9696_st1 | 9.61 | 7.42 | 6.31 | 6.68 | 7.04 | 6.23 | 6.22 |
| hsa-miR-503 | hsa-miR-503_st1 | 9.76 | 6.88 | 7.17 | 7.38 | 6.60 | 6.08 | 6.45 |
| hsa-miR-503 | hsa-miR141_st1 | 9.66 | 7.10 | 7.28 | 7.30 | 6.52 | 6.55 | 6.62 |
| hsa-miR-329 | hsa-asg-13589_st2 | 6.29 | 1.63 | 3.11 | 3.78 | 3.71 | 4.38 | 2.32 |
| hsa-miR-329 | hsa-asg-13204_st2 | 6.68 | 4.07 | 2.83 | 4.21 | 3.38 | 4.20 | 3.43 |
| hsa-miR-382 | hsa-miR-382_st1 | 9.77 | 7.16 | 6.80 | 7.35 | 7.13 | 7.40 | 6.51 |
| hsa-miR-95 | hsa-miR-95_st1 | 12.01 | 9.38 | 8.60 | 9.83 | 10.1 | 9.54 | 8.39 |
| hsa-miR-582 | hsa-miR-582_st1 | 7.47 | 5.84 | 2.13 | 4.54 | 5.95 | 4.86 | 4.05 |
| hsa-miR-154* | hsa-miR-154-_st2 | 7.25 | 5.81 | 3.48 | 4.21 | 4.98 | 4.59 | 3.89 |
| hsa-miR-204 | hsa-miR-204_st2 | 9.09 | 7.17 | 5.77 | 5.98 | 8.20 | 6.73 | 5.40 |
| hsa-miR-433 | hsa-miR-433_st2 | 5.68 | 2.41 | 2.67 | 4.54 | 2.90 | 4.17 | 2.32 |
| hsa-miR-218 | hsa-miR-218_st2 | 11.53 | 9.61 | 9.22 | 8.83 | 9.68 | 9.13 | 8.59 |
| hsa-asg-14230 | hsa-asg-14230_st1 | 6.51 | 4.29 | 3.68 | 4.38 | 4.56 | 3.29 | 3.43 |
| hsa-miR-335 | hsa-miR-335_st1 | 12.07 | 10.91 | 10.25 | 8.70 | 10.0 | 9.44 | 9.29 |
| hsa-miR-140 | hsa-miR-140_st2 | 8.60 | 7.72 | 6.11 | 6.37 | 7.21 | 6.60 | 5.45 |
| hsa-miR-18a | hsa-miR-18a_st1 | 8.08 | 5.76 | 5.97 | 7.11 | 5.96 | 4.49 | 4.08 |
| hsa-asg-9681 | hsa-asg-9681_st1 | 6.64 | 4.84 | 4.25 | 4.99 | 4.75 | 3.68 | 2.80 |
| hsa-asg-10679 | hsa-asg-10679_st2 | 5.95 | 4.07 | 2.97 | 3.66 | 4.75 | 3.35 | 2.65 |
| hsa-asg-14238 | hsa-asg-14238_st1 | 5.88 | 3.73 | 4.55 | 3.78 | 3.25 | 4.20 | 2.94 |
| hsa-asg-14146 | hsa-asg-14146_st1 | 8.27 | 6.29 | 5.72 | 6.24 | 6.49 | 5.92 | 4.79 |
| hsa-asg-11883 | hsa-asg-11883_st1 | 8.49 | 5.90 | 6.01 | 6.68 | 6.73 | 6.15 | 5.96 |
| hsa-miR-501 | hsa-miR-501_st1 | 6.76 | 5.24 | 4.81 | 2.84 | 5.09 | 4.04 | 4.60 |
| hsa-miR-18b | hsa-miR-18b_st1 | 7.91 | 6.17 | 5.56 | 6.71 | 6.01 | 5.05 | 4.62 |
| hsa-miR-594 | hsa-miR-594_st2 | 10.08 | 7.42 | 8.16 | 8.08 | 8.41 | 7.08 | 8.47 |
| hsa-asg-14163 | hsa-asg-14163_st2 | 8.27 | 6.58 | 6.19 | 6.61 | 7.29 | 5.66 | 5.67 |
| hsa-asg-14155 | hsa-asg-14155_st2 | 5.99 | 4.22 | 3.24 | 4.68 | 3.44 | 3.40 | 3.26 |
| hsa-miR144 | hsa-miR144_st2 | 5.63 | 4.59 | 4.38 | 2.63 | 3.38 | 2.65 | 2.65 |
| hsa-miR-181d | hsa-miR-181d_st1 | 10.48 | 9.12 | 7.78 | 8.91 | 8.92 | 7.57 | 7.91 |
| hsa-miR-181d | hsa-miR74_st1 | 10.39 | 8.96 | 8.17 | 9.00 | 8.79 | 7.99 | 8.20 |
| hsa-miR-181d | hsa-asg-13508_st1 | 7.81 | 6.60 | 5.77 | 6.86 | 6.60 | 5.60 | 5.62 |
| hsa-cand22 | hsa-cand22_st2 | 7.88 | 6.13 | 6.15 | 6.43 | 6.80 | 5.31 | 5.31 |
| hsa-asg-12339 | hsa-asg-12339_st1 | 9.04 | 7.59 | 6.69 | 7.66 | 7.02 | 6.26 | 5.77 |
| hsa-asg-10448 | hsa-asg-10448_st2 | 6.01 | 4.00 | 4.76 | 3.38 | 3.75 | 3.55 | 4.12 |
| hsa-miR-181a* | hsa-miR-213_st1 | 7.89 | 6.29 | 6.17 | 5.68 | 5.71 | 5.42 | 5.37 |
| hsa-miR-409-5p | hsa-miR-409-5p_st1 | 7.71 | 5.13 | 4.98 | 6.68 | 6.08 | 6.08 | 5.11 |
| hsa-asg-1221 | hsa-asg-1221_st2 | 5.60 | 4.00 | 3.24 | 4.38 | 4.21 | 3.73 | 3.08 |
| hsa-miR-454-3p | hsa-asg-11541_st2 | 10.13 | 8.62 | 8.26 | 8.54 | 8.45 | 7.84 | 7.87 |
| hsa-miR-454-3p | hsa-asg-13305_st1 | 10.73 | 9.62 | 8.93 | 9.25 | 9.13 | 8.52 | 8.72 |
| hsa-miR-339 | hsa-miR-339_st1 | 7.56 | 6.65 | 5.92 | 5.21 | 6.67 | 5.25 | 5.07 |
| hsa-miR-7 | hsa-miR-7_st1 | 10.65 | 9.45 | 8.18 | 9.71 | 8.61 | 8.16 | 7.65 |
| hsa-asg-14150 | hsa-asg-14150_st1 | 8.38 | 7.04 | 6.30 | 7.01 | 7.73 | 6.64 | 5.75 |
| hsa-asg-119 | hsa-asg-119_st1 | 6.77 | 5.24 | 4.94 | 4.93 | 5.11 | 4.38 | 3.43 |
| hsa-asg-3376 | hsa-asg-3376_st1 | 5.71 | 3.83 | 2.97 | 4.87 | 4.65 | 3.97 | 4.12 |
| hsa-miR-19b | hsa-miR-19b_st2 | 9.32 | 8.37 | 8.28 | 7.32 | 8.02 | 8.01 | 6.45 |
| hsa-asg-2005 | hsa-asg-2005_st1 | 6.77 | 4.00 | 3.95 | 5.74 | 4.14 | 5.16 | 5.34 |
| hsa-miR-10a | hsa-miR-10a_st1 | 12.93 | 11.99 | 10.95 | 11.21 | 11.7 | 11.3 | 10.4 |
| hsa-miR-18a* | hsa-miR-18a-_st1 | 6.71 | 5.66 | 5.32 | 5.53 | 5.44 | 4.76 | 5.00 |
| hsa-miR-148b | hsa-miR-148b_st2 | 10.97 | 10.03 | 8.74 | 9.45 | 10.0 | 9.60 | 8.22 |
| hsa-asg-8476 | hsa-asg-8476_st1 | 7.84 | 5.58 | 6.36 | 6.43 | 6.32 | 5.75 | 6.17 |
| hsa-miR-128a | hsa-miR-128a_st2 | 11.12 | 10.77 | 9.31 | 9.72 | 9.95 | 8.83 | 8.94 |
| hsa-asg-13912 | hsa-asg-13912_st1 | 5.93 | 5.09 | 4.18 | 4.68 | 3.98 | 4.07 | 3.81 |
| hsa-miR257 | hsa-miR257_st1 | 10.53 | 9.61 | 9.05 | 9.23 | 9.55 | 8.84 | 8.49 |
| hsa-asg-925 | hsa-asg-925_st1 | 8.02 | 7.35 | 6.32 | 6.19 | 6.96 | 6.32 | 5.21 |
| hsa-miR-106b | hsa-miR-106b_st2 | 11.16 | 9.90 | 9.59 | 10.02 | 10.0 | 9.40 | 8.12 |
| hsa-asg-14175 | hsa-asg-14175_st1 | 7.91 | 6.55 | 6.31 | 6.43 | 7.06 | 6.07 | 6.08 |
| hsa-asg-10401 | hsa-asg-10401_st1 | 5.99 | 5.09 | 4.98 | 3.90 | 5.03 | 4.20 | 4.49 |
| hsa-miR-181b | hsa-miR-181b_st2 | 12.14 | 11.22 | 10.43 | 10.98 | 10.8 | 9.81 | 10.2 |
| hsa-asg-3046 | hsa-asg-3046_st2 | 7.16 | 5.13 | 6.50 | 4.93 | 5.84 | 5.09 | 6.22 |
| hsa-asg-7131 | hsa-asg-7131_st1 | 8.45 | 6.24 | 7.21 | 6.71 | 7.29 | 6.60 | 7.16 |
| hsa-miR-212 | hsa-miR-212_st2 | 6.88 | 6.26 | 5.68 | 6.18 | 5.71 | 5.14 | 5.05 |
| hsa-asg-12429 | hsa-asg-12429_st2 | 6.77 | 4.84 | 5.33 | 5.82 | 5.18 | 4.88 | 5.48 |
| hsa-asg-4515 | hsa-asg-4515_st1 | 6.47 | 5.17 | 4.98 | 4.61 | 5.20 | 5.12 | 5.30 |
| hsa-miR-566 | hsa-miR-566_st1 | 7.36 | 6.72 | 6.12 | 5.12 | 5.83 | 6.11 | 6.10 |
| hsa-miR-15a | hsa-miR-15a_st1 | 12.46 | 11.57 | 11.16 | 11.16 | 11.3 | 10.7 | 10.6 |
| hsa-asg-5827 | hsa-asg-5827_st2 | 6.68 | 5.61 | 4.71 | 5.71 | 5.52 | 5.65 | 5.15 |
| hsa-asg-5134 | hsa-asg-5134_st2 | 5.99 | 4.93 | 4.50 | 4.87 | 4.35 | 4.94 | 4.25 |
| hsa-asg-1362 | hsa-asg-1362_st2 | 5.76 | 5.09 | 4.11 | 4.81 | 5.11 | 4.00 | 3.63 |
| hsa-asg-9115 | hsa-asg-9115_st1 | 5.39 | 4.59 | 4.25 | 4.11 | 3.98 | 3.73 | 4.54 |
| hsa-miR-660 | hsa-miR-660_st1 | 9.92 | 9.28 | 8.94 | 7.94 | 9.15 | 8.60 | 8.38 |
| hsa-asg-14233 | hsa-asg-14233_st1 | 10.62 | 9.44 | 9.21 | 9.23 | 10.1 | 9.41 | 8.84 |
| hsa-asg-10298 | hsa-asg-10298_st1 | 5.45 | 4.53 | 3.78 | 4.38 | 4.21 | 3.93 | 3.97 |
| hsa-asg-1565 | hsa-asg-1565_st2 | 5.78 | 4.88 | 4.03 | 4.75 | 5.11 | 4.98 | 4.25 |
| hsa-asg-75 | hsa-asg-75_st2 | 6.16 | 5.81 | 5.18 | 4.38 | 5.28 | 4.33 | 4.29 |
| hsa-asg-3084 | hsa-asg-3084_st1 | 6.70 | 5.05 | 4.85 | 6.09 | 5.58 | 5.09 | 5.18 |
| hsa-asg-3070 | hsa-asg-3070_st2 | 6.50 | 5.84 | 5.21 | 4.93 | 4.85 | 5.17 | 5.65 |
| hsa-asg-3854 | hsa-asg-3854_st1 | 6.59 | 5.05 | 5.50 | 6.14 | 5.74 | 5.02 | 5.52 |
| hsa-asg-1398 | hsa-asg-1398_st2 | 6.48 | 5.31 | 5.53 | 5.33 | 5.41 | 4.49 | 4.85 |
| hsa-asg-13298 | hsa-asg-13298_st1 | 7.01 | 5.17 | 6.20 | 4.87 | 5.96 | 5.40 | 6.18 |
| hsa-miR-324-5p | hsa-miR-324-5p_st1 | 9.20 | 7.91 | 8.08 | 8.34 | 8.26 | 7.77 | 7.37 |
| hsa-asg-4122 | hsa-asg-4122_st2 | 6.27 | 5.31 | 4.61 | 5.81 | 4.80 | 4.94 | 5.11 |
| hsa-miR-222 | hsa-miR-222_st2 | 10.96 | 10.40 | 9.52 | 9.55 | 10.2 | 9.72 | 9.28 |
| hsa-miR-510 | hsa-miR-510_st2 | 6.04 | 5.27 | 5.02 | 4.75 | 4.65 | 4.71 | 5.04 |
| hsa-asg-5695 | hsa-asg-5695_st2 | 5.60 | 4.84 | 4.25 | 4.87 | 4.28 | 4.86 | 3.43 |
| hsa-asg-13752 | hsa-asg-13752_st2 | 5.99 | 4.79 | 4.25 | 5.60 | 5.33 | 4.36 | 5.04 |
| hsa-asg-4224 | hsa-asg-4224_st2 | 6.10 | 5.24 | 5.28 | 5.41 | 5.29 | 4.73 | 4.60 |
| hsa-miR-185 | hsa-miR-185_st2 | 11.86 | 11.04 | 10.95 | 11.29 | 10.6 | 10.0 | 10.1 |
| hsa-asg-1631 | hsa-asg-1631_st1 | 5.68 | 4.79 | 4.18 | 4.81 | 4.94 | 4.38 | 4.25 |
| hsa-miR-223 | hsa-miR-223_st1 | 12.29 | 11.67 | 11.19 | 11.40 | 11.3 | 11.0 | 11.1 |
| hsa-miR-22 | hsa-miR-22_st1 | 12.63 | 11.71 | 11.56 | 12.02 | 12.0 | 11.6 | 11.0 |
| hsa-miR-362 | hsa-miR-362_st1 | 8.42 | 7.42 | 7.66 | 7.94 | 7.60 | 7.44 | 7.08 |
| hsa-asg-6462 | hsa-asg-6462_st1 | 6.51 | 5.47 | 5.77 | 5.41 | 6.08 | 5.66 | 4.70 |
| hsa-asg-12973 | hsa-asg-12973_st2 | 6.77 | 6.05 | 5.79 | 5.81 | 6.18 | 5.82 | 4.96 |
| hsa-asg-10922 | hsa-asg-10922_st2 | 6.96 | 6.54 | 5.74 | 5.98 | 5.85 | 6.20 | 5.46 |
| hsa-asg-3221 | hsa-asg-3221_st1 | 6.61 | 5.24 | 5.41 | 6.26 | 5.75 | 5.56 | 5.69 |
| hsa-asg-11579 | hsa-asg-11579_st2 | 6.47 | 5.40 | 5.02 | 5.96 | 6.04 | 5.43 | 5.34 |
| hsa-asg-10626 | hsa-asg-10626_st2 | 5.93 | 5.13 | 5.14 | 4.61 | 5.36 | 4.96 | 4.25 |
| hsa-asg-12746 | hsa-asg-12746_st1 | 6.97 | 6.15 | 5.64 | 6.47 | 6.12 | 5.86 | 5.37 |
| hsa-miR-425-5p | hsa-asg-14166_st2 | 11.31 | 10.97 | 10.56 | 10.57 | 10.4 | 9.80 | 9.85 |
| hsa-asg-3604 | hsa-asg-3604_st1 | 6.66 | 5.88 | 5.79 | 5.98 | 5.79 | 5.75 | 5.15 |

| | LNneg | | | | | | | | |
|---|---|---|---|---|---|---|---|---|---|
| MicroRNA | 7 | 8 | 9 | M | SD | % | ttest | log2Diff | Fold |
| hsa-miR-495 | 5.14 | 2.41 | 4.87 | 5.23 | 1.36 | 56 | 5.72E−03 | −5.36 | 41.2 |
| hsa-miR-493-5p | 4.36 | 1.85 | 4.58 | 4.66 | 1.58 | 33 | 1.37E−02 | −5.22 | 37.3 |
| hsa-asg-13404 | 2.14 | 1.09 | 2.29 | 2.82 | 1.29 | 0 | 5.46E−03 | −5.13 | 34.9 |
| hsa-miR-493-3p | 1.96 | 1.56 | 1.71 | 1.40 | 0.73 | 0 | 2.07E−04 | −4.91 | 30.2 |
| hsa-miR-493-3p | 4.31 | 3.46 | 4.08 | 3.41 | 0.95 | 0 | 1.22E−02 | −3.24 | 9.5 |
| hsa-miR-338 | 4.76 | 3.40 | 4.87 | 4.30 | 1.04 | 11 | 2.39E−03 | −4.80 | 27.9 |
| hsa-miR-368 | 5.62 | 3.97 | 5.07 | 6.25 | 1.40 | 67 | 1.26E−02 | −4.73 | 26.6 |
| hsa-miR202 | 4.25 | 2.41 | 3.06 | 3.45 | 0.88 | 0 | 9.77E−04 | −4.68 | 25.6 |
| hsa-miR-487b | 4.88 | 3.71 | 4.37 | 5.58 | 1.11 | 67 | 4.58E−03 | −4.56 | 23.6 |
| hsa-asg-13166 | 3.57 | 2.05 | 4.04 | 3.94 | 0.88 | 0 | 1.24E−03 | −4.54 | 23.3 |
| hsa-miR-139 | 9.34 | 7.34 | 5.90 | 8.84 | 1.48 | 100 | 2.08E−02 | −4.48 | 22.3 |
| hsa-miR-376a | 2.47 | 3.80 | 3.73 | 4.34 | 1.02 | 0 | 3.50E−03 | −4.39 | 21.0 |
| hsa-miR-376a | 2.90 | 4.04 | 1.83 | 3.57 | 0.86 | 0 | 1.67E−03 | −4.23 | 18.8 |
| hsa-miR-411 | 3.38 | 2.23 | 2.07 | 3.83 | 1.27 | 11 | 1.32E−02 | −4.26 | 19.1 |
| hsa-miR-539 | 1.96 | 2.58 | 1.36 | 2.52 | 0.63 | 0 | 2.40E−04 | −4.18 | 18.1 |
| hsa-miR-539 | 3.48 | 1.66 | 2.07 | 2.19 | 0.63 | 0 | 2.42E−04 | −4.16 | 17.9 |
| hsa-miR-376a | 3.83 | 4.12 | 4.64 | 4.83 | 0.75 | 11 | 7.73E−04 | −4.16 | 17.9 |
| hsa-asg-5021 | 4.57 | 3.03 | 2.07 | 4.63 | 1.58 | 22 | 3.72E−02 | −4.16 | 17.8 |
| hsa-miR-432 | 3.48 | 4.25 | 2.71 | 4.80 | 1.13 | 22 | 8.36E−03 | −4.14 | 17.6 |
| hsa-miR-424 | 5.80 | 5.70 | 7.21 | 5.69 | 0.98 | 89 | 4.07E−03 | −4.11 | 17.3 |
| hsa-asg-5617 | 1.42 | 1.46 | 1.60 | 2.78 | 1.03 | 0 | 5.29E−03 | −4.10 | 17.2 |
| hsa-miR-409-3p | 3.95 | 2.58 | 3.73 | 3.75 | 1.06 | 0 | 7.08E−03 | −4.00 | 16.0 |
| hsa-miR-369-5p | 3.38 | 2.74 | 3.50 | 3.36 | 0.56 | 0 | 1.54E−04 | −3.96 | 15.5 |
| hsa-miR-369-5p | 2.90 | 2.58 | 3.50 | 3.42 | 0.81 | 0 | 2.36E−03 | −3.72 | 13.1 |
| hsa-asg-13254 | 4.71 | 2.41 | 3.36 | 4.86 | 1.37 | 56 | 2.57E−02 | −3.96 | 15.5 |
| hsa-miR-381 | 3.48 | 1.28 | 3.22 | 3.08 | 0.91 | 0 | 3.70E−03 | −3.90 | 14.9 |
| hsa-miR-450 | 4.18 | 4.44 | 4.04 | 3.76 | 0.62 | 0 | 3.29E−04 | −3.90 | 14.9 |
| hsa-miR-450 | 2.90 | 2.89 | 2.71 | 2.79 | 0.42 | 0 | 2.64E−05 | −3.75 | 13.5 |
| hsa-cand26 | 5.27 | 4.04 | 5.44 | 4.98 | 0.91 | 22 | 3.63E−03 | −3.89 | 14.9 |
| hsa-miR-127 | 6.57 | 5.47 | 5.42 | 6.51 | 1.03 | 56 | 7.92E−03 | −3.82 | 14.2 |
| hsa-asg-10881 | 4.18 | 5.01 | 5.20 | 5.19 | 0.55 | 22 | 1.80E−04 | −3.79 | 13.8 |
| hsa-asg-13135 | 5.14 | 4.44 | 5.57 | 5.11 | 0.44 | 22 | 3.78E−05 | −3.76 | 13.5 |
| hsa-miR-410 | 3.15 | 1.85 | 2.51 | 2.51 | 0.68 | 0 | 7.96E−04 | −3.76 | 13.5 |
| hsa-miR-485-3p | 3.57 | 2.74 | 3.06 | 3.24 | 0.66 | 0 | 7.24E−04 | −3.69 | 12.9 |
| hsa-miR-485-3p | 3.66 | 3.51 | 3.84 | 3.74 | 0.51 | 0 | 5.52E−04 | −3.00 | 8.0 |
| hsa-asg-7472 | 3.57 | 0.92 | 0.93 | 1.97 | 0.85 | 0 | 3.44E−03 | −3.66 | 12.7 |
| hsa-miR-487a | 0.93 | 2.23 | 2.89 | 2.50 | 0.73 | 0 | 1.51E−03 | −3.64 | 12.5 |
| hsa-miR-487a | 3.66 | 3.71 | 3.62 | 3.72 | 0.20 | 0 | 3.41E−06 | −2.39 | 5.3 |
| hsa-miR-376b | 2.77 | 2.50 | 0.22 | 2.28 | 1.17 | 0 | 1.99E−02 | −3.56 | 11.8 |
| hsa-cand206 | 3.57 | 1.28 | 2.71 | 2.65 | 0.86 | 0 | 4.47E−03 | −3.54 | 11.6 |
| hsa-miR-154 | 3.15 | 1.28 | 3.94 | 3.47 | 1.10 | 0 | 1.95E−02 | −3.39 | 10.5 |
| hsa-miR-542-5p | 3.83 | 4.66 | 5.16 | 3.81 | 0.76 | 0 | 2.87E−03 | −3.38 | 10.4 |
| hsa-miR-542-3p | 5.38 | 5.88 | 4.70 | 5.55 | 0.49 | 78 | 1.95E−04 | −3.37 | 10.3 |
| hsa-asg-8067 | 5.30 | 5.28 | 5.38 | 5.97 | 0.60 | 33 | 7.22E−04 | −3.35 | 10.2 |
| hsa-miR-134 | 4.71 | 4.29 | 5.00 | 5.16 | 0.68 | 0 | 1.71E−03 | −3.33 | 10.1 |
| hsa-miR-379 | 6.33 | 6.13 | 6.20 | 6.58 | 0.37 | 100 | 3.12E−05 | −3.25 | 9.5 |
| hsa-miR-329 | 2.77 | 3.29 | 2.71 | 3.41 | 0.74 | 0 | 3.38E−03 | −3.19 | 9.1 |
| hsa-miR-494 | 5.71 | 5.84 | 6.58 | 6.68 | 0.64 | 100 | 1.55E−03 | −3.18 | 9.0 |
| hsa-miR-494 | 5.38 | 5.77 | 6.87 | 6.45 | 0.55 | 89 | 1.64E−03 | −2.71 | 6.5 |
| hsa-asg-9696 | 6.61 | 6.53 | 5.07 | 6.46 | 0.65 | 89 | 1.78E−03 | −3.16 | 8.9 |
| hsa-miR-503 | 6.39 | 6.60 | 5.99 | 6.62 | 0.46 | 78 | 2.03E−04 | −3.15 | 8.9 |
| hsa-miR-503 | 6.85 | 6.87 | 6.74 | 6.87 | 0.30 | 100 | 2.17E−05 | −2.79 | 6.9 |
| hsa-miR-329 | 3.66 | 2.74 | 3.06 | 3.16 | 0.84 | 0 | 7.80E−03 | −3.13 | 8.8 |
| hsa-miR-329 | 3.98 | 2.58 | 3.50 | 3.58 | 0.59 | 0 | 1.10E−03 | −3.11 | 8.6 |
| hsa-miR-382 | 6.27 | 5.91 | 5.79 | 6.70 | 0.61 | 78 | 1.44E−03 | −3.07 | 8.4 |
| hsa-miR-95 | 9.08 | 7.80 | 8.19 | 9.00 | 0.80 | 100 | 7.21E−03 | −3.01 | 8.0 |
| hsa-miR-582 | 4.05 | 4.32 | 4.64 | 4.49 | 1.12 | 22 | 3.59E−02 | −2.98 | 7.9 |
| hsa-miR-154* | 4.25 | 3.17 | 4.37 | 4.31 | 0.79 | 11 | 7.61E−03 | −2.95 | 7.7 |
| hsa-miR-204 | 5.17 | 5.40 | 5.76 | 6.18 | 1.00 | 44 | 2.43E−02 | −2.92 | 7.6 |
| hsa-miR-433 | 1.60 | 1.66 | 2.89 | 2.80 | 1.00 | 0 | 2.60E−02 | −2.89 | 7.4 |
| hsa-miR-218 | 7.75 | 7.43 | 8.74 | 8.77 | 0.77 | 100 | 9.32E−03 | −2.76 | 6.8 |
| hsa-asg-14230 | 2.77 | 3.93 | 4.04 | 3.82 | 0.58 | 0 | 2.33E−03 | −2.69 | 6.4 |
| hsa-miR-335 | 9.57 | 7.32 | 9.01 | 9.40 | 1.03 | 100 | 3.93E−02 | −2.67 | 6.4 |
| hsa-miR-140 | 4.76 | 4.75 | 5.24 | 6.02 | 1.05 | 44 | 4.91E−02 | −2.58 | 6.0 |
| hsa-miR-18a | 5.67 | 5.65 | 4.87 | 5.51 | 0.91 | 44 | 2.72E−02 | −2.57 | 6.0 |
| hsa-asg-9681 | 4.05 | 3.29 | 4.51 | 4.13 | 0.75 | 0 | 1.27E−02 | −2.51 | 5.7 |
| hsa-asg-10679 | 3.15 | 3.29 | 3.06 | 3.44 | 0.64 | 0 | 5.81E−03 | −2.51 | 5.7 |
| hsa-asg-14238 | 3.83 | 1.46 | 2.71 | 3.39 | 0.93 | 0 | 3.40E−02 | −2.49 | 5.6 |
| hsa-asg-14146 | 5.78 | 4.66 | 6.46 | 5.82 | 0.68 | 78 | 8.92E−03 | −2.46 | 5.5 |
| hsa-asg-11883 | 6.11 | 4.55 | 6.42 | 6.06 | 0.64 | 78 | 7.01E−03 | −2.43 | 5.4 |
| hsa-miR-501 | 4.47 | 4.25 | 4.37 | 4.41 | 0.70 | 0 | 1.32E−02 | −2.35 | 5.1 |
| hsa-miR-18b | 5.69 | 4.85 | 5.57 | 5.58 | 0.67 | 44 | 1.07E−02 | −2.33 | 5.0 |
| hsa-miR-594 | 8.44 | 7.71 | 6.09 | 7.76 | 0.79 | 67 | 2.39E−02 | −2.32 | 5.0 |
| hsa-asg-14163 | 6.29 | 4.89 | 4.37 | 5.95 | 0.91 | 78 | 4.15E−02 | −2.32 | 5.0 |
| hsa-asg-14155 | 3.75 | 3.80 | 3.36 | 3.68 | 0.49 | 0 | 2.06E−03 | −2.31 | 5.0 |
| hsa-miR144 | 2.77 | 3.17 | 4.21 | 3.38 | 0.81 | 0 | 2.94E−02 | −2.25 | 4.7 |
| hsa-miR-181d | 8.26 | 8.20 | 8.00 | 8.30 | 0.56 | 100 | 5.94E−03 | −2.19 | 4.6 |
| hsa-miR-181d | 8.08 | 8.15 | 7.86 | 8.36 | 0.44 | 100 | 2.20E−03 | −2.04 | 4.1 |
| hsa-miR-181d | 5.67 | 5.79 | 5.51 | 6.00 | 0.52 | 67 | 1.13E−02 | −1.81 | 3.5 |
| hsa-cand22 | 5.80 | 5.65 | 3.73 | 5.70 | 0.89 | 78 | 4.81E−02 | −2.18 | 4.5 |
| hsa-asg-12339 | 6.82 | 7.42 | 6.59 | 6.87 | 0.63 | 89 | 1.12E−02 | −2.17 | 4.5 |
| hsa-asg-10448 | 3.38 | 4.25 | 4.04 | 3.91 | 0.45 | 0 | 2.26E−03 | −2.10 | 4.3 |
| hsa-miR-181a* | 5.30 | 5.77 | 6.53 | 5.80 | 0.43 | 56 | 1.86E−03 | −2.09 | 4.2 |
| hsa-miR-409-5p | 5.90 | 5.43 | 5.24 | 5.63 | 0.58 | 44 | 9.34E−03 | −2.09 | 4.2 |
| hsa-asg-1221 | 2.62 | 2.89 | 3.50 | 3.52 | 0.61 | 0 | 1.17E−02 | −2.08 | 4.2 |
| hsa-miR-454-3p | 7.89 | 7.31 | 7.80 | 8.06 | 0.43 | 100 | 1.86E−03 | −2.07 | 4.2 |
| hsa-miR-454-3p | 8.55 | 7.80 | 8.31 | 8.76 | 0.54 | 100 | 8.84E−03 | −1.97 | 3.9 |
| hsa-miR-339 | 5.00 | 4.22 | 5.42 | 5.49 | 0.80 | 33 | 3.93E−02 | −2.07 | 4.2 |
| hsa-miR-7 | 8.64 | 8.56 | 8.46 | 8.60 | 0.64 | 100 | 1.58E−02 | −2.05 | 4.1 |
| hsa-asg-14150 | 5.77 | 5.13 | 6.37 | 6.41 | 0.80 | 11 | 4.74E−02 | −1.96 | 3.9 |
| hsa-asg-119 | 4.84 | 5.43 | 5.51 | 4.87 | 0.63 | 44 | 2.15E−02 | −1.91 | 3.7 |
| hsa-asg-3376 | 2.47 | 4.19 | 3.36 | 3.82 | 0.77 | 0 | 4.97E−02 | −1.88 | 3.7 |
| hsa-miR-19b | 6.90 | 6.51 | 7.18 | 7.45 | 0.74 | 100 | 4.42E−02 | −1.87 | 3.7 |
| hsa-asg-2005 | 5.07 | 5.30 | 5.64 | 4.93 | 0.71 | 44 | 3.82E−02 | −1.85 | 3.6 |
| hsa-miR-10a | 11.2 | 9.96 | 10.8 | 11.0 | 0.62 | 100 | 2.18E−02 | −1.85 | 3.6 |
| hsa-miR-18a* | 3.66 | 4.12 | 4.29 | 4.86 | 0.70 | 11 | 3.79E−02 | −1.85 | 3.6 |
| hsa-miR-148b | 9.07 | 8.12 | 9.12 | 9.16 | 0.71 | 100 | 4.17E−02 | −1.81 | 3.5 |
| hsa-asg-8476 | 6.75 | 5.40 | 5.61 | 6.04 | 0.47 | 11 | 6.51E−03 | −1.80 | 3.5 |
| hsa-miR-128a | 9.00 | 8.75 | 8.66 | 9.33 | 0.70 | 100 | 4.06E−02 | −1.79 | 3.5 |
| hsa-asg-13912 | 3.98 | 4.19 | 3.73 | 4.19 | 0.43 | 11 | 5.25E−03 | −1.74 | 3.3 |
| hsa-miR257 | 8.48 | 8.13 | 7.89 | 8.81 | 0.61 | 100 | 2.74E−02 | −1.72 | 3.3 |
| hsa-asg-925 | 5.80 | 5.72 | 6.86 | 6.31 | 0.67 | 89 | 4.20E−02 | −1.72 | 3.3 |
| hsa-miR-106b | 9.19 | 9.08 | 9.75 | 9.46 | 0.61 | 100 | 2.88E−02 | −1.71 | 3.3 |
| hsa-asg-14175 | 5.57 | 5.91 | 6.23 | 6.25 | 0.42 | 89 | 5.65E−03 | −1.67 | 3.2 |
| hsa-asg-10401 | 4.18 | 4.04 | 3.06 | 4.33 | 0.65 | 22 | 4.27E−02 | −1.66 | 3.2 |
| hsa-miR-181b | 10.2 | 10.4 | 10.1 | 10.4 | 0.45 | 100 | 8.24E−03 | −1.65 | 3.1 |
| hsa-asg-3046 | 5.64 | 5.36 | 5.84 | 5.62 | 0.54 | 78 | 2.58E−02 | −1.54 | 2.9 |
| hsa-asg-7131 | 6.28 | 7.49 | 7.39 | 6.93 | 0.48 | 33 | 1.70E−02 | −1.52 | 2.9 |
| hsa-miR-212 | 4.57 | 4.95 | 4.73 | 5.36 | 0.61 | 11 | 4.78E−02 | −1.51 | 2.9 |
| hsa-asg-12429 | 5.10 | 5.28 | 5.38 | 5.26 | 0.30 | 0 | 1.48E−03 | −1.51 | 2.9 |
| hsa-asg-4515 | 4.71 | 4.66 | 5.11 | 4.99 | 0.26 | 0 | 6.14E−04 | −1.48 | 2.8 |
| hsa-miR-566 | 5.55 | 6.02 | 5.42 | 5.89 | 0.47 | 56 | 1.81E−02 | −1.48 | 2.8 |
| hsa-miR-15a | 10.6 | 10.5 | 11.0 | 10.9 | 0.36 | 100 | 4.51E−03 | −1.47 | 2.8 |
| hsa-asg-5827 | 4.76 | 5.16 | 4.70 | 5.22 | 0.42 | 22 | 1.08E−02 | −1.47 | 2.8 |
| hsa-asg-5134 | 4.80 | 3.80 | 4.44 | 4.54 | 0.38 | 0 | 6.94E−03 | −1.45 | 2.7 |
| hsa-asg-1362 | 3.75 | 4.04 | 4.29 | 4.31 | 0.56 | 11 | 3.91E−02 | −1.45 | 2.7 |
| hsa-asg-9115 | 3.57 | 3.40 | 3.50 | 3.96 | 0.44 | 0 | 1.59E−02 | −1.42 | 2.7 |
| hsa-miR-660 | 7.78 | 7.90 | 8.59 | 8.51 | 0.55 | 100 | 4.13E−02 | −1.42 | 2.7 |
| hsa-asg-14233 | 9.03 | 8.85 | 8.87 | 9.23 | 0.41 | 100 | 1.30E−02 | −1.39 | 2.6 |
| hsa-asg-10298 | 4.25 | 3.71 | 3.84 | 4.07 | 0.29 | 0 | 1.82E−03 | −1.38 | 2.6 |
| hsa-asg-1565 | 3.57 | 4.12 | 4.21 | 4.43 | 0.52 | 0 | 3.81E−02 | −1.35 | 2.6 |
| hsa-asg-75 | 5.03 | 4.55 | 4.44 | 4.81 | 0.54 | 11 | 4.43E−02 | −1.35 | 2.5 |
| hsa-asg-3084 | 5.44 | 5.48 | 5.40 | 5.35 | 0.36 | 56 | 8.07E−03 | −1.34 | 2.5 |
| hsa-asg-3070 | 5.36 | 4.61 | 4.87 | 5.16 | 0.40 | 22 | 1.33E−02 | −1.33 | 2.5 |
| hsa-asg-3854 | 4.52 | 5.23 | 4.76 | 5.28 | 0.50 | 56 | 3.87E−02 | −1.31 | 2.5 |
| hsa-asg-1398 | 4.84 | 5.43 | 5.57 | 5.20 | 0.37 | 11 | 1.15E−02 | −1.29 | 2.4 |
| hsa-asg-13298 | 6.00 | 5.48 | 6.20 | 5.72 | 0.50 | 44 | 4.05E−02 | −1.29 | 2.4 |
| hsa-miR-324-5p | 7.80 | 7.85 | 7.97 | 7.93 | 0.29 | 100 | 3.05E−03 | −1.27 | 2.4 |
| hsa-asg-4122 | 5.03 | 4.71 | 4.82 | 5.01 | 0.37 | 33 | 1.18E−02 | −1.25 | 2.4 |
| hsa-miR-222 | 9.50 | 9.37 | 9.84 | 9.71 | 0.38 | 100 | 1.45E−02 | −1.25 | 2.4 |
| hsa-miR-510 | 4.52 | 4.25 | 5.07 | 4.81 | 0.32 | 11 | 6.41E−03 | −1.23 | 2.3 |
| hsa-asg-5695 | 4.67 | 4.04 | 4.21 | 4.38 | 0.48 | 0 | 4.26E−02 | −1.22 | 2.3 |
| hsa-asg-13752 | 4.52 | 4.66 | 4.58 | 4.79 | 0.45 | 0 | 3.55E−02 | −1.20 | 2.3 |
| hsa-asg-4224 | 4.71 | 4.61 | 4.37 | 4.92 | 0.39 | 22 | 2.00E−02 | −1.18 | 2.3 |
| hsa-miR-185 | 10.4 | 11.2 | 10.2 | 10.6 | 0.47 | 100 | 4.51E−02 | −1.18 | 2.3 |
| hsa-asg-1631 | 4.42 | 4.50 | 4.64 | 4.55 | 0.26 | 0 | 3.55E−03 | −1.14 | 2.2 |
| hsa-miR-223 | 11.0 | 10.6 | 11.0 | 11.1 | 0.30 | 100 | 7.92E−03 | −1.13 | 2.2 |
| hsa-miR-22 | 11.1 | 11.2 | 11.1 | 11.5 | 0.39 | 100 | 2.55E−02 | −1.13 | 2.2 |
| hsa-miR-362 | 6.93 | 6.55 | 7.04 | 7.30 | 0.43 | 100 | 3.75E−02 | −1.13 | 2.2 |
| hsa-asg-6462 | 5.20 | 4.80 | 5.40 | 5.39 | 0.44 | 44 | 4.21E−02 | −1.13 | 2.2 |
| hsa-asg-12973 | 5.03 | 5.60 | 5.70 | 5.66 | 0.41 | 78 | 3.41E−02 | −1.11 | 2.2 |
| hsa-asg-10922 | 5.80 | 5.75 | 5.40 | 5.86 | 0.35 | 56 | 1.78E−02 | −1.10 | 2.1 |
| hsa-asg-3221 | 5.24 | 5.33 | 5.16 | 5.52 | 0.35 | 0 | 1.72E−02 | −1.10 | 2.1 |
| hsa-asg-11579 | 5.07 | 4.80 | 5.28 | 5.37 | 0.41 | 67 | 3.47E−02 | −1.09 | 2.1 |
| hsa-asg-10626 | 4.84 | 4.25 | 4.97 | 4.84 | 0.39 | 0 | 2.90E−02 | −1.09 | 2.1 |
| hsa-asg-12746 | 6.05 | 5.54 | 5.87 | 5.90 | 0.34 | 100 | 1.77E−02 | −1.08 | 2.1 |
| hsa-miR-425-5p | 10.1 | 9.93 | 9.87 | 10.2 | 0.41 | 100 | 3.91E−02 | −1.07 | 2.1 |
| hsa-asg-3604 | 5.71 | 5.30 | 5.28 | 5.63 | 0.30 | 78 | 1.18E−02 | −1.03 | 2.0 |

SD, standard deviation;
%, percentage of samples expressing miRNA above background levels;
Log2Diff, difference in VSN-transformed expression bewteen SPL and LNneg samples.

### Example 33

### miRNAs Differentally Expressed Between Normal Tongue Tissue and Normal Lymph Nodes

[0337] To identify miRNAs that may be useful markers for metastasis of cancerous tongue cells to lymph nodes, the inventors identified miRNAs that are expressed at significantly higher levels in normal tongue tissue than in cancer-negative lymph nodes.

[0338] Total RNA, purified from one normal human tongue sample (FirstChoice® Human Tongue Total RNA, cat. no. B7800-2, Ambion, Austin, Tex., USA) and from nine normal human lymph node samples (FirstChoice® Human Lymph Node Total RNA, cat. no. AM7894; Ambion, Austin, Tex., USA) was purchased from Ambion. miRNA purification and labeling and microarray expression analyses were performed as described above in Example 2.

[0339] The inventors identified 158 miRNAs (62 verified, 96 predicted) with significant differential expression between thenormal tongue and normal lymph node sample (|log 2Diff| tongue vs LN neg≧1 and p-value<0.05) (Table 32). Among the verified miRNAs, hsa-miR-206, -205 and -375 were expressed at levels between 150- and 400-fold higher in the tongue sample; 9 miRNAs (hsa-miR-381, -499, -133b, -203, -429, -299-5p, -411, -133a and -493-5p) were expressed at levels between 50- and 100-fold higher in tongue; 9 miRNAs were expressed at levels between 20- and 50-fold higher in tongue compared to LNneg; 11 miRNAs were expressed at levels between 10- and 20-fold higher in tongue; and 22 miRNAs were expressed at levels between 5- and 10-fold higher in the tongue sample than in the lymph node samples. Among the predicted miRNAs, 9 miRNAs (hsa-asg-2027_st1, -14153_st2, -5617_st1, -2345_st2, -3376_st1, -7637_st2, -1794_st1, -5021_st1, and hsa-cand14_st1) were expressed at levels between 20- and 50-fold higher in tongue; 24 miRNAs were expressed at levels between 10- and 20-fold higher in the tongue sample compared to normal lymph nodes; and 30 miRNAs were expressed at levels between 5- and 10-fold higher in the tongue sample than in normal lymph nodes.

TABLE 32
MicroRNAs Differentially Expressed Between Normal Tongue Samples (TNG) and
Cancer-Negative Lymph Node Samples (LNneg) from Patients.

| | Probe | | LNneg | | | | | |
|---|---|---|---|---|---|---|---|---|
| MicroRNA | ID | TNG | 1 | 2 | 3 | 4 | 5 | 6 |
| hsa-miR-206 | hsa-miR-206_st2 | 13.91 | 4.07 | 4.94 | 1.89 | 9.39 | 3.93 | 5.79 |
| hsa-miR-205 | hsa-miR-205_st1 | 13.17 | 2.90 | 5.86 | 5.64 | 2.00 | 3.55 | 6.06 |
| hsa-miR-375 | hsa-miR-375_st1 | 11.90 | 5.95 | 4.88 | 6.24 | 2.82 | 2.93 | 3.63 |
| hsa-miR-381 | hsa-miR-381_st2 | 9.71 | 2.75 | 2.32 | 4.21 | 3.38 | 4.17 | 2.94 |
| hsa-miR-499 | hsa-miR12_st1 | 11.50 | 5.44 | 4.76 | 5.37 | 6.66 | 4.07 | 4.38 |
| hsa-miR-499 | hsa-miR-499_st1 | 11.40 | 5.31 | 4.61 | 4.75 | 6.57 | 4.49 | 4.12 |
| hsa-miR-133b | hsa-miR-133b_st2 | 13.07 | 7.35 | 6.17 | 4.46 | 10.19 | 7.42 | 6.15 |
| hsa-miR-203 | hsa-miR-203_st2 | 13.23 | 7.32 | 5.84 | 7.22 | 8.24 | 6.42 | 5.36 |
| hsa-miR-429 | hsa-miR-429_st1 | 9.16 | 3.42 | 1.54 | 3.66 | 2.10 | 2.33 | 2.65 |
| hsa-miR-299-5p | hsa-miR-299-5p_st2 | 10.94 | 5.71 | 4.44 | 5.81 | 6.37 | 5.96 | 2.94 |
| hsa-miR-411 | hsa-miR-411_st1 | 9.95 | 4.84 | 3.68 | 4.54 | 5.22 | 5.52 | 2.94 |
| hsa-miR-133a | hsa-miR-133a_st1 | 13.48 | 7.76 | 7.65 | 5.93 | 10.81 | 8.16 | 7.08 |
| hsa-miR-493-5p | hsa-miR-493-5p_st1 | 10.32 | 4.35 | 3.78 | 6.89 | 6.18 | 6.30 | 3.63 |
| hsa-asg-2027 | hsa-asg-2027_st1 | 9.44 | 3.53 | 3.48 | 1.63 | 5.22 | 4.44 | 4.19 |
| hsa-miR-200a | hsa-miR-200a_st2 | 11.04 | 6.26 | 5.02 | 6.49 | 5.71 | 5.25 | 4.54 |
| hsa-miR-200b | hsa-miR-200b_st1 | 13.05 | 7.61 | 7.75 | 8.91 | 6.69 | 6.79 | 6.82 |
| hsa-asg-14153 | hsa-asg-14153_st2 | 7.99 | 3.05 | 2.23 | 3.04 | 2.98 | 2.33 | 2.65 |
| hsa-miR-539 | hsa-miR177_st1 | 7.42 | 2.58 | 2.50 | 1.37 | 2.39 | 1.80 | 1.86 |
| hsa-miR-539 | hsa-miR-539_st1 | 7.62 | 2.03 | 3.11 | 2.63 | 3.38 | 2.65 | 2.94 |
| hsa-miR-378 | hsa-miR-378_st1 | 9.24 | 4.69 | 4.41 | 4.84 | 6.38 | 5.43 | 2.14 |
| hsa-miR-368 | hsa-miR-368_st2 | 11.08 | 6.48 | 6.47 | 7.70 | 8.08 | 7.68 | 5.18 |
| hsa-asg-5617 | hsa-asg-5617_st1 | 7.57 | 3.73 | 3.24 | 3.90 | 3.60 | 3.40 | 2.65 |
| hsa-miR-495 | hsa-miR-495_st1 | 9.90 | 6.01 | 4.76 | 6.97 | 6.25 | 6.29 | 4.38 |
| hsa-miR-200c | hsa-miR-200c_st1 | 13.61 | 9.59 | 8.79 | 10.3 | 8.17 | 8.12 | 8.08 |
| hsa-asg-2345 | hsa-asg-2345_st2 | 6.91 | 1.63 | 2.50 | 2.40 | 3.60 | 1.44 | 2.49 |
| hsa-asg-3376 | hsa-asg-3376_st1 | 8.36 | 3.83 | 2.97 | 4.87 | 4.65 | 3.97 | 4.12 |
| hsa-miR-376a | hsa-miR-376a_st2 | 8.83 | 5.13 | 4.03 | 5.49 | 5.66 | 4.82 | 3.97 |
| hsa-miR-376a | hsa-asg-14234_st1 | 7.88 | 3.31 | 4.25 | 3.38 | 3.98 | 4.82 | 3.63 |
| hsa-miR-376a | hsa-asg-10049_st1 | 9.05 | 5.01 | 4.85 | 6.09 | 5.55 | 5.31 | 4.05 |
| hsa-asg-7637 | hsa-asg-7637_st2 | 8.24 | 3.64 | 2.50 | 4.46 | 3.44 | 3.89 | 3.97 |
| hsa-miR-576 | hsa-miR-576_st2 | 6.74 | 2.22 | 2.83 | 3.04 | 1.69 | 1.98 | 1.95 |
| hsa-miR-487b | hsa-miR-487b_st2 | 10.01 | 6.05 | 5.79 | 6.97 | 6.90 | 6.22 | 5.34 |
| hsa-cand14 | hsa-cand14_st1 | 6.63 | 1.83 | 1.54 | 1.37 | 2.10 | 2.79 | 1.95 |
| hsa-asg-1794 | hsa-asg-1794_st1 | 6.35 | 1.83 | 1.94 | 2.63 | 1.69 | 2.16 | 1.03 |
| hsa-asg-5021 | hsa-asg-5021_st1 | 8.96 | 5.17 | 4.38 | 7.00 | 6.05 | 5.88 | 3.48 |
| hsa-asg-9198 | hsa-asg-9198_st1 | 5.85 | 2.03 | 1.54 | 1.37 | 1.09 | 2.07 | 1.76 |
| hsa-cand206 | hsa-cand206_st1 | 6.87 | 2.22 | 1.94 | 3.78 | 3.60 | 2.65 | 2.14 |
| hsa-asg-2399 | hsa-asg-2399_st2 | 6.71 | 3.05 | 3.36 | 2.84 | 2.98 | 2.16 | 2.49 |
| hsa-asg-7472 | hsa-asg-7472_st2 | 6.14 | 1.63 | 2.13 | 1.89 | 2.00 | 2.86 | 1.76 |
| hsa-miR-141 | hsa-miR-141_st1 | 8.31 | 5.05 | 3.78 | 4.93 | 4.41 | 4.36 | 2.80 |
| hsa-asg-11715 | hsa-asg-11715_st2 | 6.03 | 1.83 | 2.32 | 2.15 | 1.48 | 2.07 | 1.76 |
| hsa-miR-605 | hsa-miR-605_st1 | 6.64 | 2.58 | 2.13 | 3.04 | 0.73 | 1.71 | 2.14 |
| hsa-asg-8428 | hsa-asg-8428_st2 | 5.90 | 2.22 | 1.94 | 2.63 | 2.00 | 2.49 | 1.03 |
| hsa-asg-14065 | hsa-asg-14065_st2 | 6.84 | 1.24 | 2.58 | 5.31 | 4.62 | 1.80 | 2.49 |
| hsa-asg-13254 | hsa-asg-13254_st1 | 8.91 | 5.58 | 5.32 | 6.66 | 5.89 | 5.87 | 3.97 |
| hsa-asg-791 | hsa-asg-791_st1 | 6.00 | 2.22 | 2.97 | 1.63 | 2.00 | 2.16 | 2.40 |
| hsa-miR-379 | hsa-miR-379_st1 | 10.58 | 6.51 | 6.37 | 7.12 | 6.96 | 7.01 | 6.54 |
| hsa-asg-2484 | hsa-asg-2484_st2 | 6.46 | 2.41 | 2.32 | 1.37 | 3.98 | 2.16 | 2.32 |
| hsa-miR-127 | hsa-miR-127_st1 | 10.35 | 6.80 | 5.52 | 7.96 | 7.53 | 7.66 | 5.66 |
| hsa-asg-13404 | hsa-asg-13404_st2 | 6.53 | 4.15 | 2.67 | 5.28 | 2.90 | 3.24 | 1.57 |
| hsa-asg-1826 | hsa-asg-1826_st2 | 6.38 | 3.31 | 2.97 | 2.15 | 3.55 | 2.49 | 2.14 |
| hsa-miR-517c | hsa-miR-517c_st2 | 6.32 | 2.90 | 2.50 | 3.04 | 3.60 | 3.06 | 3.43 |
| hsa-asg-1296 | hsa-asg-1296_st1 | 6.85 | 3.05 | 2.50 | 4.81 | 2.39 | 2.49 | 2.73 |
| hsa-miR-34c | hsa-miR-34c_st2 | 7.18 | 1.83 | 2.50 | 3.52 | 3.66 | 3.59 | 3.01 |
| hsa-miR-376b | hsa-miR-376b_st1 | 5.86 | 1.83 | 2.13 | 4.11 | 3.32 | 2.65 | 1.03 |
| hsa-asg-11777 | hsa-asg-11777_st1 | 6.06 | 2.58 | 2.13 | 1.89 | 3.60 | 1.98 | 1.95 |
| hsa-miR-369-5p | hsa-asg-1521_st1 | 6.94 | 3.73 | 3.36 | 4.01 | 2.20 | 3.68 | 3.68 |
| hsa-miR-369-5p | hsa-miR-369-5p_st2 | 6.55 | 3.53 | 2.67 | 4.46 | 4.35 | 4.33 | 2.49 |
| hsa-asg-10250 | hsa-asg-10250_st1 | 5.61 | 1.83 | 2.13 | 1.12 | 2.10 | 2.79 | 1.76 |
| hsa-asg-12139 | hsa-asg-12139_st2 | 5.88 | 2.75 | 2.32 | 2.63 | 2.30 | 1.62 | 2.14 |
| hsa-miR-154 | hsa-miR-154_st2 | 7.01 | 3.73 | 2.50 | 4.30 | 4.35 | 4.88 | 3.08 |
| hsa-asg-10131 | hsa-asg-10131_st2 | 6.76 | 3.31 | 3.11 | 3.52 | 2.48 | 2.49 | 3.20 |
| hsa-asg-128 | hsa-asg-128_st2 | 8.08 | 4.84 | 4.71 | 4.54 | 5.11 | 4.52 | 4.12 |
| hsa-asg-13705 | hsa-asg-13705_st1 | 5.75 | 1.63 | 0.97 | 3.78 | 2.30 | 2.65 | 2.32 |
| hsa-asg-10393 | hsa-asg-10393_st1 | 6.13 | 2.75 | 1.54 | 2.40 | 3.89 | 2.79 | 2.80 |
| hsa-asg-11088 | hsa-asg-11088_st1 | 5.74 | 1.24 | 1.06 | 3.84 | 1.79 | 0.94 | 2.32 |
| hsa-asg-1765 | hsa-asg-1765_st1 | 5.96 | 2.22 | 2.13 | 2.84 | 3.60 | 2.33 | 2.32 |
| hsa-asg-924 | hsa-asg-924_st1 | 6.77 | 4.64 | 4.25 | 3.38 | 4.44 | 2.65 | 2.73 |
| hsa-miR-187 | hsa-miR-187_st1 | 6.72 | 4.74 | 2.75 | 2.74 | 3.75 | 3.18 | 3.32 |
| hsa-asg-12142 | hsa-asg-12142_st1 | 5.66 | 2.58 | 2.67 | 2.15 | 3.50 | 1.80 | 1.76 |
| hsa-miR-517a | hsa-miR-517b_st1 | 7.54 | 4.97 | 5.56 | 6.51 | 3.85 | 3.18 | 3.77 |
| hsa-asg-6178 | hsa-asg-6178_st2 | 5.56 | 2.41 | 3.36 | 2.40 | 3.80 | 2.16 | 1.21 |
| hsa-miR-489 | hsa-miR-489_st2 | 9.45 | 7.34 | 6.75 | 6.01 | 7.47 | 6.33 | 5.45 |
| hsa-asg-13166 | hsa-asg-13166_st2 | 7.21 | 4.47 | 3.36 | 4.87 | 4.94 | 4.07 | 4.12 |
| hsa-asg-5119 | hsa-asg-5119_st1 | 5.73 | 2.41 | 2.67 | 1.89 | 1.90 | 1.98 | 2.49 |
| hsa-miR202 | hsa-miR202_st2 | 6.63 | 3.83 | 2.67 | 4.93 | 3.94 | 3.59 | 2.40 |
| hsa-asg-13231 | hsa-asg-13231_st1 | 6.63 | 3.91 | 4.11 | 4.21 | 4.44 | 2.93 | 3.38 |
| hsa-asg-3998 | hsa-asg-3998_st1 | 11.90 | 8.62 | 8.53 | 8.70 | 9.41 | 8.74 | 8.32 |
| hsa-asg-1619 | hsa-asg-1619_st2 | 6.45 | 4.35 | 3.24 | 2.84 | 4.80 | 3.12 | 2.80 |
| hsa-miR-432 | hsa-miR-432_st2 | 7.92 | 4.53 | 5.38 | 5.93 | 5.52 | 5.74 | 5.62 |
| hsa-miR-493-3p | hsa-miR-493-3p_st1 | 6.51 | 4.64 | 3.05 | 4.06 | 2.98 | 2.24 | 1.86 |
| hsa-asg-54 | hsa-asg-54_st2 | 5.23 | 2.22 | 0.97 | 2.15 | 2.48 | 1.35 | 2.80 |
| hsa-miR-329 | hsa-asg-13589_st2 | 6.21 | 1.63 | 3.11 | 3.78 | 3.71 | 4.38 | 2.32 |
| hsa-miR-329 | hsa-miR-329_st1 | 5.80 | 3.73 | 2.97 | 4.61 | 3.25 | 4.54 | 2.80 |
| hsa-miR-329 | hsa-asg-13204_st2 | 5.04 | 4.07 | 2.83 | 4.21 | 3.38 | 4.20 | 3.43 |
| hsa-miR-410 | hsa-miR-410_st1 | 5.56 | 2.41 | 2.32 | 1.37 | 3.71 | 2.49 | 2.80 |
| hsa-asg-378 | hsa-asg-378_st1 | 5.75 | 2.22 | 2.67 | 2.15 | 4.70 | 2.79 | 2.94 |
| hsa-asg-13878 | hsa-asg-13878_st2 | 6.21 | 2.90 | 3.48 | 2.84 | 4.82 | 4.24 | 3.32 |
| hsa-asg-13070 | hsa-asg-13070_st1 | 5.51 | 2.90 | 2.50 | 2.63 | 4.14 | 3.06 | 2.14 |
| hsa-miR-128a | hsa-miR-128a_st2 | 12.26 | 10.7 | 9.31 | 9.72 | 9.95 | 8.83 | 8.94 |
| hsa-miR-422a | hsa-miR-422a_st1 | 12.14 | 9.09 | 8.97 | 9.17 | 9.80 | 8.95 | 8.80 |
| hsa-asg-3822 | hsa-asg-3822_st2 | 5.65 | 2.03 | 2.97 | 3.66 | 2.00 | 2.41 | 2.14 |
| hsa-miR-189 | hsa-miR-189_st1 | 8.24 | 6.07 | 5.74 | 4.93 | 7.23 | 6.15 | 4.49 |
| hsa-miR-200a* | hsa-miR-200a-_st2 | 5.62 | 3.05 | 2.83 | 2.15 | 3.89 | 2.57 | 1.76 |
| hsa-asg-1203 | hsa-asg-1203_st1 | 6.59 | 4.47 | 4.31 | 2.63 | 3.80 | 4.17 | 4.49 |
| hsa-asg-4439 | hsa-asg-4439_st2 | 6.20 | 3.83 | 4.31 | 3.21 | 2.66 | 1.62 | 3.63 |
| hsa-miR-299-3p | hsa-asg-10378_st1 | 5.62 | 3.64 | 3.36 | 3.21 | 1.90 | 2.41 | 1.95 |
| hsa-miR-31 | hsa-miR-31_st2 | 12.04 | 10.4 | 9.74 | 8.95 | 10.15 | 8.68 | 8.54 |
| hsa-miR-338 | hsa-miR-338_st1 | 7.12 | 5.09 | 4.03 | 5.57 | 4.85 | 4.00 | 2.14 |
| hsa-asg-9365 | hsa-asg-9365_st2 | 5.25 | 3.31 | 2.13 | 1.89 | 2.48 | 2.49 | 2.32 |
| hsa-miR-128b | hsa-miR-128b_st1 | 12.52 | 11.2 | 9.78 | 10.0 | 10.35 | 9.17 | 9.27 |
| hsa-asg-9723 | hsa-asg-9723_st2 | 5.21 | 2.58 | 2.83 | 2.84 | 2.57 | 1.10 | 2.14 |
| hsa-asg-2844 | hsa-asg-2844_st1 | 5.61 | 3.73 | 4.18 | 2.15 | 2.82 | 1.98 | 2.94 |
| hsa-miR-582 | hsa-miR-582_st1 | 7.23 | 5.84 | 2.13 | 4.54 | 5.95 | 4.86 | 4.05 |
| hsa-miR-95 | hsa-miR-95_st1 | 11.71 | 9.38 | 8.60 | 9.83 | 10.16 | 9.54 | 8.39 |
| hsa-miR-154* | hsa-miR-154-_st2 | 7.01 | 5.81 | 3.48 | 4.21 | 4.98 | 4.59 | 3.89 |
| hsa-asg-13997 | hsa-asg-13997_st2 | 5.21 | 3.05 | 3.24 | 2.15 | 2.98 | 2.16 | 2.32 |
| hsa-asg-11160 | hsa-asg-11160_st2 | 5.89 | 2.75 | 3.11 | 3.38 | 3.05 | 2.86 | 2.65 |
| hsa-asg-10947 | hsa-asg-10947_st1 | 5.99 | 3.64 | 3.48 | 1.63 | 5.09 | 3.73 | 3.63 |
| hsa-asg-7159 | hsa-asg-7159_st2 | 6.01 | 3.53 | 3.24 | 2.40 | 3.94 | 3.89 | 3.43 |
| hsa-miR-96 | hsa-miR-96_st1 | 5.90 | 4.97 | 3.36 | 3.04 | 2.98 | 4.07 | 2.80 |
| hsa-asg-1587 | hsa-asg-1587_st1 | 5.08 | 2.22 | 1.94 | 3.04 | 1.48 | 3.06 | 2.32 |
| hsa-asg-8174 | hsa-asg-8174_st1 | 5.85 | 3.31 | 4.03 | 2.84 | 2.98 | 2.86 | 3.20 |
| hsa-miR-422b | hsa-miR-422b_st2 | 13.35 | 10.6 | 10.5 | 10.7 | 11.31 | 10.68 | 10.34 |
| hsa-asg-1270 | hsa-asg-1270_st2 | 6.23 | 4.22 | 3.58 | 1.89 | 4.06 | 4.54 | 4.83 |
| hsa-asg-10360 | hsa-asg-10360_st1 | 5.82 | 3.42 | 3.36 | 3.04 | 4.65 | 3.68 | 3.20 |
| hsa-cand207 | hsa-cand207_st1 | 5.67 | 2.58 | 4.11 | 3.66 | 2.48 | 3.64 | 3.63 |
| hsa-asg-8616 | hsa-asg-8616_st2 | 5.89 | 3.42 | 4.44 | 1.63 | 4.53 | 3.55 | 4.19 |
| hsa-miR-382 | hsa-miR-382_st1 | 9.15 | 7.16 | 6.80 | 7.35 | 7.13 | 7.40 | 6.51 |
| hsa-cand330 | hsa-cand330_st2 | 6.58 | 4.74 | 4.98 | 3.52 | 4.70 | 5.12 | 4.12 |
| hsa-asg-4283 | hsa-asg-4283_st2 | 5.57 | 3.91 | 3.48 | 2.63 | 3.80 | 3.89 | 2.80 |
| hsa-miR-9* | hsa-miR-9-_st2 | 7.88 | 6.19 | 6.05 | 5.57 | 6.10 | 5.37 | 5.81 |
| hsa-asg-13471 | hsa-asg-13471_st1 | 6.94 | 4.74 | 4.71 | 4.38 | 5.11 | 5.31 | 5.34 |
| hsa-miR-183 | hsa-miR-183_st1 | 9.28 | 7.65 | 6.71 | 6.71 | 7.93 | 7.54 | 5.78 |
| hsa-asg-4840 | hsa-asg-4840_st1 | 7.09 | 5.44 | 5.02 | 3.52 | 5.28 | 5.40 | 4.98 |
| hsa-asg-11361 | hsa-asg-11361_st2 | 5.66 | 2.75 | 3.48 | 3.38 | 3.25 | 3.59 | 3.32 |
| hsa-asg-1596 | hsa-asg-1596_st2 | 6.45 | 4.41 | 5.06 | 4.01 | 3.19 | 4.36 | 4.12 |
| hsa-asg-13888 | hsa-asg-13888_st2 | 4.47 | 1.43 | 2.83 | 1.63 | 3.12 | 1.80 | 2.14 |
| hsa-asg-11883 | hsa-asg-11883_st1 | 8.28 | 5.90 | 6.01 | 6.68 | 6.73 | 6.15 | 5.96 |
| hsa-miR-9 | hsa-miR-9_st2 | 5.48 | 3.42 | 3.48 | 2.84 | 3.25 | 3.59 | 2.14 |
| hsa-asg-12515 | hsa-asg-12515_st2 | 6.16 | 4.00 | 4.25 | 3.04 | 4.10 | 4.57 | 4.32 |
| hsa-asg-10236 | hsa-asg-10236_st2 | 5.97 | 4.07 | 3.48 | 3.04 | 4.51 | 5.14 | 3.72 |
| hsa-asg-13135 | hsa-asg-13135_st1 | 7.28 | 5.61 | 5.61 | 5.24 | 4.89 | 4.76 | 4.70 |
| hsa-asg-3251 | hsa-asg-3251_st1 | 5.64 | 4.22 | 4.11 | 4.01 | 2.82 | 3.50 | 3.89 |
| hsa-asg-11923 | hsa-asg-11923_st1 | 5.61 | 4.15 | 3.86 | 3.38 | 4.28 | 4.20 | 3.43 |
| hsa-asg-4140 | hsa-asg-4140_st2 | 5.66 | 3.42 | 3.48 | 3.21 | 4.35 | 3.77 | 3.43 |
| hsa-asg-2419 | hsa-asg-2419_st2 | 4.57 | 2.58 | 2.67 | 3.38 | 2.82 | 1.98 | 1.76 |
| hsa-asg-67 | hsa-asg-67_st2 | 5.56 | 4.53 | 3.24 | 4.01 | 2.30 | 3.18 | 3.53 |
| hsa-miR-494 | hsa-miR-494_st1 | 8.70 | 6.39 | 7.25 | 7.23 | 6.95 | 6.60 | 7.61 |
| hsa-miR-409-5p | hsa-miR-409-5p_st1 | 7.64 | 5.13 | 4.98 | 6.68 | 6.08 | 6.08 | 5.11 |
| hsa-cand443 | hsa-cand443_st2 | 6.55 | 3.91 | 5.10 | 3.90 | 4.48 | 5.73 | 5.21 |
| hsa-asg-9514 | hsa-asg-9514_st1 | 5.34 | 2.58 | 4.50 | 3.21 | 2.48 | 4.33 | 3.63 |
| hsa-miR-135b | hsa-cand78_st1 | 5.08 | 3.42 | 2.50 | 3.66 | 4.14 | 3.68 | 2.80 |
| hsa-asg-10478 | hsa-asg-10478_st2 | 5.28 | 3.05 | 4.03 | 3.38 | 2.48 | 4.38 | 4.12 |
| hsa-asg-10679 | hsa-asg-10679_st2 | 5.29 | 4.07 | 2.97 | 3.66 | 4.75 | 3.35 | 2.65 |
| hsa-asg-10881 | hsa-asg-10881_st1 | 7.02 | 5.71 | 4.98 | 6.06 | 5.43 | 4.76 | 5.40 |
| hsa-miR-134 | hsa-miR-134_st2 | 6.85 | 5.09 | 5.73 | 6.00 | 5.84 | 5.67 | 4.15 |
| hsa-miR-486 | hsa-miR-486_st2 | 10.66 | 8.64 | 9.11 | 8.28 | 9.94 | 9.23 | 8.87 |
| hsa-asg-11397 | hsa-asg-11397_st1 | 5.28 | 3.64 | 4.25 | 3.90 | 3.50 | 3.93 | 3.63 |
| hsa-asg-3742 | hsa-asg-3742_st1 | 5.60 | 3.83 | 4.90 | 3.66 | 4.25 | 4.84 | 3.43 |
| hsa-asg-6803 | hsa-asg-6803_st1 | 5.56 | 5.01 | 3.36 | 3.66 | 4.48 | 4.59 | 4.12 |
| hsa-asg-9009 | hsa-asg-9009_st1 | 6.11 | 5.01 | 5.52 | 4.16 | 4.48 | 4.41 | 5.20 |
| hsa-asg-14233 | hsa-asg-14233_st1 | 10.70 | 9.44 | 9.21 | 9.23 | 10.14 | 9.41 | 8.84 |
| hsa-asg-807 | hsa-asg-807_st2 | 6.30 | 4.15 | 5.41 | 4.54 | 4.35 | 4.71 | 5.52 |
| hsa-asg-13279 | hsa-asg-13279_st1 | 8.60 | 7.57 | 7.42 | 7.55 | 8.17 | 7.21 | 6.54 |
| hsa-asg-5149 | hsa-asg-5149_st2 | 6.21 | 5.31 | 4.92 | 4.71 | 4.82 | 5.40 | 5.21 |
| hsa-asg-11181 | hsa-asg-11181_st1 | 6.89 | 5.66 | 5.19 | 6.13 | 6.30 | 5.56 | 5.54 |
| hsa-asg-7471 | hsa-asg-7471_st1 | 6.96 | 5.58 | 5.67 | 5.68 | 6.74 | 5.67 | 5.25 |
| hsa-asg-8476 | hsa-asg-8476_st1 | 7.35 | 5.58 | 6.36 | 6.43 | 6.32 | 5.75 | 6.17 |
| hsa-miR-628 | hsa-miR-628_st2 | 8.90 | 8.29 | 7.83 | 7.21 | 8.00 | 7.32 | 7.47 |
| hsa-miR-210 | hsa-miR-210_st1 | 7.89 | 6.50 | 5.60 | 6.85 | 7.08 | 7.08 | 6.66 |
| hsa-asg-4438 | hsa-asg-4438_st2 | 5.87 | 4.53 | 4.50 | 5.04 | 4.53 | 4.11 | 4.49 |
| hsa-asg-12179 | hsa-asg-12179_st1 | 6.45 | 6.15 | 4.98 | 5.45 | 5.67 | 5.36 | 4.88 |
| hsa-asg-5675 | hsa-asg-5675_st2 | 5.57 | 5.47 | 4.41 | 4.71 | 4.32 | 4.59 | 4.49 |
| hsa-asg-8682 | hsa-asg-8682_st2 | 5.50 | 4.22 | 4.61 | 5.09 | 4.80 | 4.11 | 4.79 |

| | LNneg | | | | | | | | |
|---|---|---|---|---|---|---|---|---|---|
| MicroRNA | 7 | 8 | 9 | M | SD | % | ttest | log2Diff | Fold |
| hsa-miR-206 | 8.45 | 4.44 | 4.97 | 5.32 | 2.31 | 44 | 7.80E−03 | −8.59 | 385.6 |
| hsa-miR-205 | 3.38 | 5.30 | 7.74 | 4.71 | 1.85 | 33 | 2.48E−03 | −8.45 | 349.9 |
| hsa-miR-375 | 1.00 | 4.61 | 6.37 | 4.27 | 1.82 | 0 | 4.07E−03 | −7.63 | 198.6 |
| hsa-miR-381 | 3.48 | 1.28 | 3.22 | 3.08 | 0.91 | 0 | 1.28E−04 | −6.63 | 98.9 |
| hsa-miR-499 | 4.80 | 4.55 | 3.84 | 4.87 | 0.85 | 22 | 7.86E−05 | −6.63 | 98.7 |
| hsa-miR-499 | 5.03 | 4.25 | 4.58 | 4.86 | 0.74 | 22 | 3.10E−05 | −6.54 | 93.1 |
| hsa-miR-133b | 7.20 | 4.44 | 5.36 | 6.53 | 1.79 | 67 | 8.48E−03 | −6.54 | 92.9 |
| hsa-miR-203 | 5.17 | 6.05 | 9.34 | 6.77 | 1.38 | 78 | 2.22E−03 | −6.45 | 87.6 |
| hsa-miR-429 | 2.31 | 2.41 | 5.36 | 2.86 | 1.14 | 0 | 7.79E−04 | −6.30 | 78.7 |
| hsa-miR-299-5p | 5.03 | 2.41 | 3.94 | 4.74 | 1.40 | 44 | 2.99E−03 | −6.20 | 73.7 |
| hsa-miR-411 | 3.38 | 2.23 | 2.07 | 3.83 | 1.27 | 11 | 1.85E−03 | −6.13 | 69.9 |
| hsa-miR-133a | 8.20 | 6.23 | 6.46 | 7.59 | 1.47 | 89 | 5.17E−03 | −5.89 | 59.4 |
| hsa-miR-493-5p | 4.36 | 1.85 | 4.58 | 4.66 | 1.58 | 33 | 9.25E−03 | −5.66 | 50.5 |
| hsa-asg-2027 | 4.25 | 4.19 | 4.51 | 3.94 | 1.01 | 0 | 8.48E−04 | −5.51 | 45.5 |
| hsa-miR-200a | 4.05 | 4.75 | 7.76 | 5.54 | 1.15 | 67 | 1.89E−03 | −5.50 | 45.3 |
| hsa-miR-200b | 6.50 | 7.64 | 10.4 | 7.68 | 1.27 | 100 | 3.86E−03 | −5.37 | 41.4 |
| hsa-asg-14153 | 1.17 | 2.74 | 4.37 | 2.73 | 0.85 | 0 | 3.77E−04 | −5.26 | 38.4 |
| hsa-miR-539 | 3.48 | 1.66 | 2.07 | 2.19 | 0.63 | 0 | 4.96E−05 | −5.23 | 37.4 |
| hsa-miR-539 | 1.96 | 2.58 | 1.36 | 2.52 | 0.63 | 0 | 5.96E−05 | −5.10 | 34.4 |
| hsa-miR-378 | 6.14 | 3.56 | 0.64 | 4.25 | 1.87 | 22 | 3.54E−02 | −4.99 | 31.8 |
| hsa-miR-368 | 5.62 | 3.97 | 5.07 | 6.25 | 1.40 | 67 | 1.14E−02 | −4.83 | 28.5 |
| hsa-asg-5617 | 1.42 | 1.46 | 1.60 | 2.78 | 1.03 | 0 | 2.20E−03 | −4.79 | 27.7 |
| hsa-miR-495 | 5.14 | 2.41 | 4.87 | 5.23 | 1.36 | 56 | 1.16E−02 | −4.67 | 25.5 |
| hsa-miR-200c | 7.96 | 8.87 | 11.5 | 9.05 | 1.21 | 100 | 7.35E−03 | −4.56 | 23.6 |
| hsa-asg-2345 | 3.15 | 2.58 | 1.36 | 2.35 | 0.76 | 0 | 4.69E−04 | −4.55 | 23.5 |
| hsa-asg-3376 | 2.47 | 4.19 | 3.36 | 3.82 | 0.77 | 0 | 5.36E−04 | −4.53 | 23.1 |
| hsa-miR-376a | 2.47 | 3.80 | 3.73 | 4.34 | 1.02 | 0 | 3.10E−03 | −4.49 | 22.4 |
| hsa-miR-376a | 2.90 | 4.04 | 1.83 | 3.57 | 0.86 | 0 | 1.48E−03 | −4.31 | 19.8 |
| hsa-miR-376a | 3.83 | 4.12 | 4.64 | 4.83 | 0.75 | 11 | 7.04E−04 | −4.23 | 18.7 |
| hsa-asg-7637 | 3.27 | 3.61 | 5.24 | 3.78 | 0.77 | 0 | 5.67E−04 | −4.46 | 22.1 |
| hsa-miR-576 | 1.96 | 2.05 | 3.06 | 2.31 | 0.52 | 0 | 4.13E−05 | −4.44 | 21.6 |
| hsa-miR-487b | 4.88 | 3.71 | 4.37 | 5.58 | 1.11 | 67 | 5.34E−03 | −4.43 | 21.6 |
| hsa-cand14 | 2.31 | 2.41 | 3.50 | 2.20 | 0.65 | 0 | 2.05E−04 | −4.43 | 21.5 |
| hsa-asg-1794 | 2.14 | 1.46 | 2.89 | 1.97 | 0.57 | 0 | 8.28E−05 | −4.38 | 20.8 |
| hsa-asg-5021 | 4.57 | 3.03 | 2.07 | 4.63 | 1.58 | 22 | 3.14E−02 | −4.34 | 20.2 |
| hsa-asg-9198 | 1.60 | 1.09 | 1.83 | 1.60 | 0.36 | 0 | 3.95E−06 | −4.25 | 19.1 |
| hsa-cand206 | 3.57 | 1.28 | 2.71 | 2.65 | 0.86 | 0 | 1.61E−03 | −4.22 | 18.6 |
| hsa-asg-2399 | 1.09 | 2.23 | 2.51 | 2.52 | 0.67 | 0 | 3.45E−04 | −4.19 | 18.2 |
| hsa-asg-7472 | 3.57 | 0.92 | 0.93 | 1.97 | 0.85 | 0 | 1.60E−03 | −4.17 | 18.0 |
| hsa-miR-141 | 3.83 | 3.80 | 4.51 | 4.16 | 0.69 | 0 | 4.63E−04 | −4.15 | 17.8 |
| hsa-asg-11715 | 0.63 | 1.46 | 3.36 | 1.90 | 0.74 | 0 | 7.38E−04 | −4.13 | 17.5 |
| hsa-miR-605 | 2.90 | 3.03 | 4.44 | 2.52 | 1.03 | 0 | 5.33E−03 | −4.12 | 17.4 |
| hsa-asg-8428 | 0.04 | 2.14 | 1.60 | 1.79 | 0.81 | 0 | 1.32E−03 | −4.12 | 17.3 |
| hsa-asg-14065 | 2.90 | 1.37 | 2.40 | 2.75 | 1.39 | 0 | 2.31E−02 | −4.09 | 17.1 |
| hsa-asg-13254 | 4.71 | 2.41 | 3.36 | 4.86 | 1.37 | 56 | 2.34E−02 | −4.04 | 16.5 |
| hsa-asg-791 | 0.50 | 1.46 | 2.51 | 1.98 | 0.72 | 0 | 7.17E−04 | −4.02 | 16.2 |
| hsa-miR-379 | 6.33 | 6.13 | 6.20 | 6.58 | 0.37 | 100 | 6.68E−06 | −4.01 | 16.1 |
| hsa-asg-2484 | 3.38 | 2.74 | 2.51 | 2.57 | 0.74 | 0 | 1.13E−03 | −3.88 | 14.7 |
| hsa-miR-127 | 6.57 | 5.47 | 5.42 | 6.51 | 1.03 | 56 | 7.77E−03 | −3.84 | 14.3 |
| hsa-asg-13404 | 2.14 | 1.09 | 2.29 | 2.82 | 1.29 | 0 | 2.58E−02 | −3.72 | 13.1 |
| hsa-asg-1826 | 2.90 | 3.10 | 1.83 | 2.72 | 0.59 | 0 | 3.59E−04 | −3.67 | 12.7 |
| hsa-miR-517c | 1.42 | 2.23 | 2.07 | 2.70 | 0.70 | 0 | 1.16E−03 | −3.63 | 12.4 |
| hsa-asg-1296 | 3.15 | 3.88 | 4.13 | 3.24 | 0.85 | 0 | 3.80E−03 | −3.62 | 12.3 |
| hsa-miR-34c | 3.48 | 3.71 | 6.83 | 3.57 | 1.38 | 11 | 3.77E−02 | −3.61 | 12.2 |
| hsa-miR-376b | 2.77 | 2.50 | 0.22 | 2.28 | 1.17 | 0 | 1.95E−02 | −3.58 | 11.9 |
| hsa-asg-11777 | 2.90 | 2.23 | 3.06 | 2.48 | 0.60 | 0 | 4.60E−04 | −3.58 | 11.9 |
| hsa-miR-369-5p | 3.38 | 2.74 | 3.50 | 3.36 | 0.56 | 0 | 3.09E−04 | −3.57 | 11.9 |
| hsa-miR-369-5p | 2.90 | 2.58 | 3.50 | 3.42 | 0.81 | 0 | 6.19E−03 | −3.13 | 8.7 |
| hsa-asg-10250 | 3.48 | 2.05 | 1.14 | 2.04 | 0.74 | 0 | 1.87E−03 | −3.57 | 11.9 |
| hsa-asg-12139 | 1.60 | 2.05 | 3.50 | 2.32 | 0.59 | 0 | 4.35E−04 | −3.56 | 11.8 |
| hsa-miR-154 | 3.15 | 1.28 | 3.94 | 3.47 | 1.10 | 0 | 1.60E−02 | −3.54 | 11.6 |
| hsa-asg-10131 | 2.62 | 3.17 | 5.07 | 3.22 | 0.79 | 0 | 2.76E−03 | −3.54 | 11.6 |
| hsa-asg-128 | 4.96 | 4.32 | 4.13 | 4.58 | 0.35 | 0 | 1.35E−05 | −3.50 | 11.3 |
| hsa-asg-13705 | 0.37 | 3.17 | 3.22 | 2.27 | 1.11 | 0 | 1.75E−02 | −3.49 | 11.2 |
| hsa-asg-10393 | 1.78 | 3.51 | 2.51 | 2.66 | 0.74 | 0 | 2.21E−03 | −3.47 | 11.0 |
| hsa-asg-11088 | 1.60 | 3.35 | 4.48 | 2.29 | 1.30 | 0 | 3.57E−02 | −3.45 | 10.9 |
| hsa-asg-1765 | 3.27 | 2.23 | 2.07 | 2.56 | 0.55 | 0 | 3.78E−04 | −3.41 | 10.6 |
| hsa-asg-924 | 2.14 | 2.74 | 3.50 | 3.38 | 0.89 | 0 | 7.12E−03 | −3.38 | 10.4 |
| hsa-miR-187 | 3.03 | 3.35 | 3.14 | 3.33 | 0.61 | 0 | 7.92E−04 | −3.38 | 10.4 |
| hsa-asg-12142 | 2.77 | 1.09 | 2.29 | 2.29 | 0.70 | 0 | 1.77E−03 | −3.37 | 10.3 |
| hsa-miR-517a | 4.05 | 3.88 | 2.51 | 4.25 | 1.23 | 22 | 3.51E−02 | −3.29 | 9.7 |
| hsa-asg-6178 | 0.78 | 2.23 | 2.29 | 2.29 | 0.93 | 0 | 1.05E−02 | −3.27 | 9.6 |
| hsa-miR-489 | 5.71 | 5.40 | 5.20 | 6.18 | 0.84 | 56 | 6.33E−03 | −3.27 | 9.6 |
| hsa-asg-13166 | 3.57 | 2.05 | 4.04 | 3.94 | 0.88 | 0 | 8.09E−03 | −3.26 | 9.6 |
| hsa-asg-5119 | 2.90 | 2.58 | 3.62 | 2.49 | 0.55 | 0 | 5.48E−04 | −3.24 | 9.4 |
| hsa-miR202 | 4.25 | 2.41 | 3.06 | 3.45 | 0.88 | 0 | 8.93E−03 | −3.17 | 9.0 |
| hsa-asg-13231 | 1.78 | 2.05 | 4.44 | 3.47 | 1.01 | 0 | 1.83E−02 | −3.15 | 8.9 |
| hsa-asg-3998 | 9.20 | 8.74 | 8.47 | 8.75 | 0.35 | 100 | 2.63E−05 | −3.15 | 8.9 |
| hsa-asg-1619 | 2.31 | 3.03 | 3.22 | 3.30 | 0.78 | 0 | 5.18E−03 | −3.15 | 8.9 |
| hsa-miR-432 | 3.48 | 4.25 | 2.71 | 4.80 | 1.13 | 22 | 3.05E−02 | −3.12 | 8.7 |
| hsa-miR-493-3p | 4.31 | 3.46 | 4.08 | 3.41 | 0.95 | 0 | 1.50E−02 | −3.10 | 8.6 |
| hsa-asg-54 | 2.90 | 1.85 | 2.71 | 2.16 | 0.66 | 0 | 2.34E−03 | −3.07 | 8.4 |
| hsa-miR-329 | 3.66 | 2.74 | 3.06 | 3.16 | 0.84 | 0 | 8.78E−03 | −3.06 | 8.3 |
| hsa-miR-329 | 2.77 | 3.29 | 2.71 | 3.41 | 0.74 | 0 | 1.52E−02 | −2.39 | 5.2 |
| hsa-miR-329 | 3.98 | 2.58 | 3.50 | 3.58 | 0.59 | 0 | 4.72E−02 | −1.47 | 2.8 |
| hsa-miR-410 | 3.15 | 1.85 | 2.51 | 2.51 | 0.68 | 0 | 2.82E−03 | −3.05 | 8.3 |
| hsa-asg-378 | 1.09 | 2.74 | 3.06 | 2.71 | 0.96 | 0 | 1.66E−02 | −3.05 | 8.3 |
| hsa-asg-13878 | 3.03 | 2.41 | 1.83 | 3.21 | 0.90 | 0 | 1.37E−02 | −3.00 | 8.0 |
| hsa-asg-13070 | 2.31 | 1.85 | 1.36 | 2.54 | 0.79 | 0 | 7.55E−03 | −2.97 | 7.8 |
| hsa-miR-128a | 9.00 | 8.75 | 8.66 | 9.33 | 0.70 | 100 | 3.97E−03 | −2.94 | 7.7 |
| hsa-miR-422a | 9.67 | 9.22 | 9.12 | 9.20 | 0.33 | 100 | 3.00E−05 | −2.94 | 7.7 |
| hsa-asg-3822 | 1.60 | 2.89 | 4.76 | 2.72 | 0.99 | 0 | 2.27E−02 | −2.93 | 7.6 |
| hsa-miR-189 | 4.92 | 3.51 | 4.92 | 5.33 | 1.09 | 44 | 3.49E−02 | −2.91 | 7.5 |
| hsa-miR-200a* | 2.14 | 3.17 | 2.89 | 2.72 | 0.64 | 0 | 2.67E−03 | −2.91 | 7.5 |
| hsa-asg-1203 | 3.91 | 3.71 | 1.83 | 3.70 | 0.90 | 0 | 1.60E−02 | −2.89 | 7.4 |
| hsa-asg-4439 | 2.77 | 3.71 | 4.04 | 3.31 | 0.84 | 0 | 1.15E−02 | −2.89 | 7.4 |
| hsa-miR-299-3p | 1.60 | 3.17 | 3.50 | 2.75 | 0.78 | 0 | 8.25E−03 | −2.88 | 7.3 |
| hsa-miR-31 | 7.71 | 8.66 | 10.0 | 9.21 | 0.92 | 100 | 1.89E−02 | −2.83 | 7.1 |
| hsa-miR-338 | 4.76 | 3.40 | 4.87 | 4.30 | 1.04 | 11 | 3.33E−02 | −2.82 | 7.1 |
| hsa-asg-9365 | 2.77 | 2.74 | 2.07 | 2.47 | 0.43 | 0 | 2.90E−04 | −2.78 | 6.9 |
| hsa-miR-128b | 9.53 | 9.18 | 9.23 | 9.75 | 0.70 | 100 | 5.58E−03 | −2.77 | 6.8 |
| hsa-asg-9723 | 2.31 | 3.66 | 2.07 | 2.46 | 0.70 | 0 | 5.60E−03 | −2.76 | 6.8 |
| hsa-asg-2844 | 2.77 | 2.58 | 2.51 | 2.85 | 0.71 | 0 | 5.98E−03 | −2.76 | 6.8 |
| hsa-miR-582 | 4.05 | 4.32 | 4.64 | 4.49 | 1.12 | 22 | 4.90E−02 | −2.75 | 6.7 |
| hsa-miR-95 | 9.08 | 7.80 | 8.19 | 9.00 | 0.80 | 100 | 1.22E−02 | −2.71 | 6.5 |
| hsa-miR-154* | 4.25 | 3.17 | 4.37 | 4.31 | 0.79 | 11 | 1.16E−02 | −2.71 | 6.5 |
| hsa-asg-13997 | 1.25 | 3.17 | 2.29 | 2.51 | 0.65 | 0 | 4.31E−03 | −2.70 | 6.5 |
| hsa-asg-11160 | 2.47 | 3.51 | 5.11 | 3.21 | 0.79 | 0 | 1.21E−02 | −2.68 | 6.4 |
| hsa-asg-10947 | 3.57 | 2.58 | 2.51 | 3.32 | 0.98 | 0 | 3.17E−02 | −2.68 | 6.4 |
| hsa-asg-7159 | 3.98 | 3.40 | 2.29 | 3.35 | 0.62 | 0 | 3.64E−03 | −2.67 | 6.3 |
| hsa-miR-96 | 3.03 | 1.85 | 3.06 | 3.24 | 0.87 | 11 | 1.94E−02 | −2.66 | 6.3 |
| hsa-asg-1587 | 2.77 | 2.41 | 2.51 | 2.42 | 0.51 | 0 | 1.11E−03 | −2.66 | 6.3 |
| hsa-asg-8174 | 2.77 | 2.74 | 4.13 | 3.21 | 0.53 | 0 | 1.47E−03 | −2.65 | 6.3 |
| hsa-miR-422b | 10.94 | 10.7 | 10.5 | 10.7 | 0.28 | 100 | 2.07E−05 | −2.64 | 6.2 |
| hsa-asg-1270 | 3.03 | 3.29 | 3.22 | 3.63 | 0.90 | 0 | 2.53E−02 | −2.60 | 6.1 |
| hsa-asg-10360 | 3.15 | 2.41 | 2.71 | 3.29 | 0.63 | 0 | 5.38E−03 | −2.53 | 5.8 |
| hsa-cand207 | 2.62 | 2.74 | 3.22 | 3.19 | 0.60 | 0 | 4.21E−03 | −2.49 | 5.6 |
| hsa-asg-8616 | 3.83 | 2.05 | 3.06 | 3.41 | 1.02 | 0 | 4.92E−02 | −2.48 | 5.6 |
| hsa-miR-382 | 6.27 | 5.91 | 5.79 | 6.70 | 0.61 | 78 | 5.29E−03 | −2.45 | 5.5 |
| hsa-cand330 | 2.62 | 3.97 | 3.94 | 4.19 | 0.80 | 11 | 2.19E−02 | −2.38 | 5.2 |
| hsa-asg-4283 | 3.48 | 2.23 | 2.51 | 3.19 | 0.65 | 0 | 8.46E−03 | −2.38 | 5.2 |
| hsa-miR-9* | 4.92 | 4.71 | 5.20 | 5.55 | 0.53 | 44 | 3.24E−03 | −2.33 | 5.0 |
| hsa-asg-13471 | 4.36 | 4.04 | 3.50 | 4.61 | 0.61 | 11 | 6.89E−03 | −2.32 | 5.0 |
| hsa-miR-183 | 7.50 | 6.30 | 6.63 | 6.97 | 0.72 | 89 | 1.56E−02 | −2.31 | 5.0 |
| hsa-asg-4840 | 4.62 | 4.55 | 4.37 | 4.80 | 0.61 | 11 | 7.43E−03 | −2.29 | 4.9 |
| hsa-asg-11361 | 3.83 | 2.58 | 4.29 | 3.39 | 0.52 | 0 | 3.12E−03 | −2.27 | 4.8 |
| hsa-asg-1596 | 4.12 | 4.19 | 4.37 | 4.20 | 0.49 | 0 | 2.43E−03 | −2.25 | 4.7 |
| hsa-asg-13888 | 2.62 | 1.85 | 2.71 | 2.24 | 0.60 | 0 | 7.71E−03 | −2.23 | 4.7 |
| hsa-asg-11883 | 6.11 | 4.55 | 6.42 | 6.06 | 0.64 | 78 | 1.09E−02 | −2.23 | 4.7 |
| hsa-miR-9 | 3.48 | 3.29 | 4.13 | 3.29 | 0.55 | 0 | 5.32E−03 | −2.19 | 4.6 |
| hsa-asg-12515 | 3.66 | 4.12 | 3.73 | 3.98 | 0.45 | 0 | 1.74E−03 | −2.18 | 4.5 |
| hsa-asg-10236 | 3.15 | 3.71 | 3.36 | 3.80 | 0.68 | 0 | 1.59E−02 | −2.18 | 4.5 |
| hsa-asg-13135 | 5.14 | 4.44 | 5.57 | 5.11 | 0.44 | 22 | 1.52E−03 | −2.17 | 4.5 |
| hsa-asg-3251 | 2.90 | 3.03 | 3.22 | 3.52 | 0.55 | 0 | 6.41E−03 | −2.11 | 4.3 |
| hsa-asg-11923 | 2.31 | 2.41 | 3.62 | 3.52 | 0.73 | 0 | 2.66E−02 | −2.10 | 4.3 |
| hsa-asg-4140 | 4.12 | 3.71 | 2.71 | 3.58 | 0.49 | 0 | 3.60E−03 | −2.08 | 4.2 |
| hsa-asg-2419 | 1.60 | 2.41 | 3.22 | 2.49 | 0.62 | 0 | 1.27E−02 | −2.08 | 4.2 |
| hsa-asg-67 | 3.66 | 3.51 | 3.62 | 3.51 | 0.61 | 0 | 1.29E−02 | −2.05 | 4.1 |
| hsa-miR-494 | 5.71 | 5.84 | 6.58 | 6.68 | 0.64 | 100 | 1.77E−02 | −2.01 | 4.0 |
| hsa-miR-409-5p | 5.90 | 5.43 | 5.24 | 5.63 | 0.58 | 44 | 1.12E−02 | −2.01 | 4.0 |
| hsa-cand443 | 4.84 | 3.80 | 4.29 | 4.59 | 0.68 | 33 | 2.51E−02 | −1.96 | 3.9 |
| hsa-asg-9514 | 4.18 | 2.58 | 3.36 | 3.43 | 0.79 | 0 | 4.98E−02 | −1.91 | 3.8 |
| hsa-miR-135b | 3.57 | 1.66 | 3.22 | 3.18 | 0.75 | 0 | 4.41E−02 | −1.89 | 3.7 |
| hsa-asg-10478 | 3.66 | 2.74 | 2.71 | 3.39 | 0.69 | 0 | 3.24E−02 | −1.88 | 3.7 |
| hsa-asg-10679 | 3.15 | 3.29 | 3.06 | 3.44 | 0.64 | 0 | 2.49E−02 | −1.85 | 3.6 |
| hsa-asg-10881 | 4.18 | 5.01 | 5.20 | 5.19 | 0.55 | 22 | 1.36E−02 | −1.82 | 3.5 |
| hsa-miR-134 | 4.71 | 4.29 | 5.00 | 5.16 | 0.68 | 0 | 4.74E−02 | −1.69 | 3.2 |
| hsa-miR-486 | 9.77 | 9.32 | 7.96 | 9.01 | 0.65 | 100 | 4.31E−02 | −1.65 | 3.1 |
| hsa-asg-11397 | 3.27 | 3.51 | 3.36 | 3.66 | 0.31 | 0 | 1.13E−03 | −1.61 | 3.1 |
| hsa-asg-3742 | 3.57 | 4.19 | 3.62 | 4.03 | 0.55 | 0 | 2.63E−02 | −1.57 | 3.0 |
| hsa-asg-6803 | 3.15 | 3.51 | 4.13 | 4.00 | 0.62 | 11 | 4.49E−02 | −1.56 | 2.9 |
| hsa-asg-9009 | 4.92 | 3.66 | 3.99 | 4.59 | 0.61 | 0 | 4.56E−02 | −1.52 | 2.9 |
| hsa-asg-14233 | 9.03 | 8.85 | 8.87 | 9.23 | 0.41 | 100 | 9.66E−03 | −1.48 | 2.8 |
| hsa-asg-807 | 4.57 | 4.97 | 5.54 | 4.86 | 0.52 | 11 | 3.11E−02 | −1.44 | 2.7 |
| hsa-asg-13279 | 6.86 | 6.98 | 6.66 | 7.22 | 0.52 | 100 | 3.47E−02 | −1.39 | 2.6 |
| hsa-asg-5149 | 3.66 | 4.78 | 4.90 | 4.86 | 0.51 | 0 | 3.67E−02 | −1.35 | 2.5 |
| hsa-asg-11181 | 5.33 | 5.03 | 5.18 | 5.55 | 0.43 | 11 | 1.83E−02 | −1.34 | 2.5 |
| hsa-asg-7471 | 5.24 | 4.97 | 6.07 | 5.65 | 0.52 | 56 | 4.37E−02 | −1.31 | 2.5 |
| hsa-asg-8476 | 6.75 | 5.40 | 5.61 | 6.04 | 0.47 | 11 | 2.91E−02 | −1.31 | 2.5 |
| hsa-miR-628 | 7.23 | 7.64 | 7.43 | 7.60 | 0.37 | 100 | 1.07E−02 | −1.30 | 2.5 |
| hsa-miR-210 | 6.09 | 6.46 | 7.00 | 6.59 | 0.50 | 89 | 3.82E−02 | −1.30 | 2.5 |
| hsa-asg-4438 | 4.18 | 4.80 | 5.32 | 4.61 | 0.39 | 0 | 1.50E−02 | −1.26 | 2.4 |
| hsa-asg-12179 | 4.80 | 5.01 | 5.32 | 5.29 | 0.43 | 11 | 3.50E−02 | −1.16 | 2.2 |
| hsa-asg-5675 | 4.42 | 4.22 | 4.17 | 4.53 | 0.39 | 0 | 3.48E−02 | −1.04 | 2.1 |
| hsa-asg-8682 | 3.75 | 4.61 | 4.21 | 4.46 | 0.42 | 0 | 4.84E−02 | −1.03 | 2.0 |

SD, standard deviation;
%, percentage of samples expressing miRNA above background levels;
Log2Diff, difference in VSN-transformed expression bewteen TNG and LNneg samples.

### Example 34

### miRNAs Differentally Expressed Between Normal Brain Tissue and Normal Lymph Nodes

[0340] To identify miRNAs that may be useful markers for metastasis of cancerous brain cells to lymph nodes, the inventors identified miRNAs that are expressed at significantly higher levels in normal brain tissue than in cancer-negative lymph nodes.

[0341] Total RNA, purified from one normal human brain sample (FirstChoice® Human Brain Total RNA, cat. no. AM7962; Ambion, Austin, Tex., USA) and from nine normal human lymph node samples (FirstChoice® Human Lymph Node Total RNA, cat. no. AM7894; Ambion, Austin, Tex., USA) was purchased from Ambion. miRNA purification and labeling and microarray expression analyses were performed as described above in Example 2.

[0342] The inventors identified 180 miRNAs (81 verified, 99 predicted) with significant differential expression between the normal brain and normal lymph node samples (log 2Diff brain vs LN neg≧1 and p-value<0.05) (Table 33). Among the verified miRNAs, hsa-miR-124a was expressed at a level more than 1000-fold higher in the brain sample; 5 miRNAs (hsa-miR-433, -383, -129, -487b, and -323) were expressed at levels between 100- and 210-fold higher in brain; 12 miRNAs were expressed at levels between 50- and 100-fold higher in brain; 21 miRNAs were expressed at levels between 20- and 50-fold higher in brain; 15 miRNAs were expressed at levels between 10- and 20-fold higher in brain; and 15 miRNAs were expressed at levels between 5- and 10-fold higher in the brain sample than in normal lymph nodes. Among the predicted miRNAs, hsa-asg-13159_st1 was expressed at a level over 1000-fold higher in the brain sample; 3 miRNAs (hsa-miR-13404 st2, -3373_st2 and hsa-miR202_st2) were expressed at levels between 100- and 200-fold higher in brain; 4 miRNAs were expressed at levels between 50- and 100-fold higher in brain; 10 miRNAs were expressed at levels between 20- and 50-fold higher in brain; 20 miRNAs were expressed at levels between 10- and 20-fold higher in brain; and 27 miRNAs were expressed at levels between 5- and 10-fold higher in the brain sample than in normal lymph nodes.

TABLE 33
MicroRNAs Differentially Expressed Between Normal Brain Samples (BRN) and
Cancer-Negative Lymph Node Samples (LNneg) from Patients.

| | Probe | | LNneg | | | | | | |
|---|---|---|---|---|---|---|---|---|---|
| MicroRNA | ID | BRN | 1 | 2 | 3 | 4 | 5 | 6 | 7 |
| hsa-miR-124a | hsa-cand79_st1 | 13.89 | 3.53 | 3.78 | 3.78 | 4.44 | 3.64 | 2.14 | 2.31 |
| hsa-miR-124a | hsa-miR-124a_st1 | 13.76 | 4.29 | 4.18 | 3.78 | 4.80 | 3.81 | 3.32 | 2.14 |
| hsa-asg-13159 | hsa-asg-13159_st1 | 13.49 | 3.18 | 3.11 | 4.01 | 3.05 | 4.11 | 2.65 | 2.62 |
| hsa-miR-433 | hsa-miR-433_st2 | 10.49 | 2.41 | 2.67 | 4.54 | 2.90 | 4.17 | 2.32 | 1.60 |
| hsa-asg-13404 | hsa-asg-13404_st2 | 10.25 | 4.15 | 2.67 | 5.28 | 2.90 | 3.24 | 1.57 | 2.14 |
| hsa-miR-383 | hsa-miR-383_st1 | 9.70 | 3.31 | 2.83 | 2.40 | 2.57 | 3.18 | 1.30 | 2.62 |
| hsa-asg-3373 | hsa-asg-3373_st2 | 9.88 | 3.53 | 1.94 | 2.63 | 3.75 | 4.04 | 3.63 | 1.78 |
| hsa-miR-129 | hsa-miR-129_st1 | 11.47 | 4.84 | 4.76 | 5.24 | 4.80 | 4.17 | 3.89 | 4.47 |
| hsa-miR-487b | hsa-miR-487b_st2 | 12.44 | 6.05 | 5.79 | 6.97 | 6.90 | 6.22 | 5.34 | 4.88 |
| hsa-miR202 | hsa-miR202_st2 | 10.29 | 3.83 | 2.67 | 4.93 | 3.94 | 3.59 | 2.40 | 4.25 |
| hsa-miR-323 | hsa-miR-323_st1 | 10.72 | 4.15 | 3.42 | 4.01 | 5.76 | 5.09 | 2.94 | 3.62 |
| hsa-miR-329 | hsa-asg-13589_st2 | 9.72 | 1.63 | 3.11 | 3.78 | 3.71 | 4.38 | 2.32 | 3.66 |
| hsa-miR-329 | hsa-miR-329_st1 | 9.94 | 3.73 | 2.97 | 4.61 | 3.25 | 4.54 | 2.80 | 2.77 |
| hsa-miR-329 | hsa-asg-13204_st2 | 9.81 | 4.07 | 2.83 | 4.21 | 3.38 | 4.20 | 3.43 | 3.98 |
| hsa-miR-485-3p | hsa-miR23_st2 | 9.77 | 4.29 | 2.50 | 4.11 | 3.25 | 2.41 | 3.20 | 3.57 |
| hsa-miR-485-3p | hsa-miR-485-3p_st2 | 9.68 | 3.64 | 2.97 | 4.30 | 4.41 | 4.24 | 3.08 | 3.66 |
| hsa-miR-539 | hsa-miR-539_st1 | 9.01 | 2.03 | 3.11 | 2.63 | 3.38 | 2.65 | 2.94 | 1.96 |
| hsa-miR-539 | hsa-miR177_st1 | 8.42 | 2.58 | 2.50 | 1.37 | 2.39 | 1.80 | 1.86 | 3.48 |
| hsa-miR-9 | hsa-miR-9_st2 | 9.71 | 3.42 | 3.48 | 2.84 | 3.25 | 3.59 | 2.14 | 3.48 |
| hsa-miR-9 | hsa-cand90_st2 | 8.39 | 3.53 | 3.11 | 2.63 | 2.98 | 2.79 | 2.14 | 2.62 |
| hsa-cand26 | hsa-cand26_st2 | 11.37 | 6.11 | 5.56 | 6.04 | 4.06 | 3.64 | 4.70 | 5.27 |
| hsa-miR-410 | hsa-miR-410_st1 | 8.90 | 2.41 | 2.32 | 1.37 | 3.71 | 2.49 | 2.80 | 3.15 |
| hsa-miR-149 | hsa-miR-149_st2 | 9.39 | 4.47 | 3.82 | 1.76 | 4.14 | 2.72 | 1.48 | 2.47 |
| hsa-asg-13135 | hsa-asg-13135_st1 | 11.46 | 5.61 | 5.61 | 5.24 | 4.89 | 4.76 | 4.70 | 5.14 |
| hsa-asg-4574 | hsa-asg-4574_st2 | 9.73 | 3.42 | 2.83 | 3.66 | 2.82 | 4.90 | 3.20 | 3.27 |
| hsa-miR-495 | hsa-miR-495_st1 | 11.49 | 6.01 | 4.76 | 6.97 | 6.25 | 6.29 | 4.38 | 5.14 |
| hsa-miR-485-5p | hsa-miR-485-5p_st2 | 9.22 | 3.42 | 3.24 | 3.38 | 3.66 | 3.24 | 1.95 | 3.48 |
| hsa-miR-432 | hsa-miR-432_st2 | 10.87 | 4.53 | 5.38 | 5.93 | 5.52 | 5.74 | 5.62 | 3.48 |
| hsa-miR-487a | hsa-miR-487a_st2 | 8.51 | 2.22 | 2.83 | 2.63 | 3.38 | 2.16 | 3.20 | 0.93 |
| hsa-miR-487a | hsa-asg-6915_st1 | 8.81 | 4.07 | 3.58 | 3.90 | 3.38 | 3.85 | 3.72 | 3.66 |
| hsa-asg-10881 | hsa-asg-10881_st1 | 11.02 | 5.71 | 4.98 | 6.06 | 5.43 | 4.76 | 5.40 | 4.18 |
| hsa-miR-338 | hsa-miR-338_st1 | 10.10 | 5.09 | 4.03 | 5.57 | 4.85 | 4.00 | 2.14 | 4.76 |
| hsa-miR-137 | hsa-miR-137_st1 | 8.38 | 2.58 | 2.32 | 3.38 | 1.90 | 2.33 | 3.32 | 2.14 |
| hsa-miR-346 | hsa-miR-346_st1 | 8.85 | 2.75 | 2.03 | 2.52 | 3.75 | 4.44 | 2.65 | 3.48 |
| hsa-asg-7295 | hsa-asg-7295_st2 | 7.99 | 2.90 | 2.13 | 3.38 | 1.59 | 2.07 | 2.49 | 2.77 |
| hsa-miR-411 | hsa-miR-411_st1 | 9.37 | 4.84 | 3.68 | 4.54 | 5.22 | 5.52 | 2.94 | 3.38 |
| hsa-miR-592 | hsa-miR-592_st1 | 8.40 | 4.29 | 2.50 | 2.84 | 3.12 | 1.80 | 1.76 | 3.03 |
| hsa-miR-592 | hsa-asg-4400_st1 | 8.24 | 3.05 | 3.24 | 3.66 | 1.69 | 1.62 | 2.65 | 3.03 |
| hsa-miR-330 | hsa-miR-330_st2 | 10.62 | 6.07 | 5.65 | 5.82 | 4.25 | 5.22 | 5.15 | 5.33 |
| hsa-miR-330 | hsa-asg-14199_st1 | 10.49 | 5.88 | 5.23 | 6.15 | 5.26 | 5.30 | 4.85 | 5.10 |
| hsa-asg-13166 | hsa-asg-13166_st2 | 9.29 | 4.47 | 3.36 | 4.87 | 4.94 | 4.07 | 4.12 | 3.57 |
| hsa-asg-5617 | hsa-asg-5617_st1 | 8.05 | 3.73 | 3.24 | 3.90 | 3.60 | 3.40 | 2.65 | 1.42 |
| hsa-asg-4201 | hsa-asg-4201_st1 | 7.22 | 1.43 | 1.94 | 1.37 | 1.90 | 2.33 | 2.49 | 2.47 |
| hsa-asg-7472 | hsa-asg-7472_st2 | 7.14 | 1.63 | 2.13 | 1.89 | 2.00 | 2.86 | 1.76 | 3.57 |
| hsa-miR-299-5p | hsa-miR-299-5p_st2 | 9.91 | 5.71 | 4.44 | 5.81 | 6.37 | 5.96 | 2.94 | 5.03 |
| hsa-miR-328 | hsa-miR-328_st1 | 10.13 | 7.38 | 1.15 | 5.90 | 7.34 | 4.54 | 4.12 | 5.78 |
| hsa-asg-10202 | hsa-asg-10202_st2 | 8.26 | 4.69 | 2.03 | 3.30 | 5.24 | 3.06 | 1.95 | 2.47 |
| hsa-asg-3985 | hsa-asg-3985_st1 | 7.23 | 2.22 | 2.50 | 1.37 | 1.69 | 2.24 | 2.49 | 0.78 |
| hsa-miR-127 | hsa-miR-127_st1 | 11.61 | 6.80 | 5.52 | 7.96 | 7.53 | 7.66 | 5.66 | 6.57 |
| hsa-miR-380-3p | hsa-miR-380-3p_st2 | 6.60 | 2.22 | 1.15 | 1.12 | 0.57 | 2.16 | 2.32 | 1.96 |
| hsa-miR-380-3p | hsa-asg-13118_st1 | 6.52 | 2.03 | 3.11 | 3.04 | 1.28 | 1.62 | 2.32 | 1.25 |
| hsa-asg-14178 | hsa-asg-14178_st2 | 6.89 | 1.05 | 1.15 | 2.63 | 1.69 | 3.64 | 0.87 | 0.26 |
| hsa-miR-9* | hsa-miR-9-_st2 | 10.58 | 6.19 | 6.05 | 5.57 | 6.10 | 5.37 | 5.81 | 4.92 |
| hsa-asg-13284 | hsa-asg-13284_st1 | 8.82 | 4.88 | 2.03 | 3.59 | 5.83 | 4.82 | 2.80 | 4.71 |
| hsa-miR-379 | hsa-miR-379_st1 | 11.51 | 6.51 | 6.37 | 7.12 | 6.96 | 7.01 | 6.54 | 6.33 |
| hsa-miR-138 | hsa-miR-138_st1 | 10.50 | 6.36 | 5.68 | 6.82 | 6.41 | 5.91 | 4.57 | 4.92 |
| hsa-cand206 | hsa-cand206_st1 | 7.51 | 2.22 | 1.94 | 3.78 | 3.60 | 2.65 | 2.14 | 3.57 |
| hsa-miR-584 | hsa-miR-584_st2 | 10.60 | 5.74 | 6.05 | 6.24 | 6.23 | 5.72 | 5.72 | 5.24 |
| hsa-miR-132 | hsa-miR-132_st1 | 13.06 | 9.71 | 8.51 | 8.34 | 8.34 | 8.56 | 8.02 | 8.00 |
| hsa-miR-382 | hsa-miR-382_st1 | 11.32 | 7.16 | 6.80 | 7.35 | 7.13 | 7.40 | 6.51 | 6.27 |
| hsa-miR-154* | hsa-miR-154-_st2 | 8.92 | 5.81 | 3.48 | 4.21 | 4.98 | 4.59 | 3.89 | 4.25 |
| hsa-miR-598 | hsa-miR-598_st2 | 10.20 | 6.70 | 5.93 | 5.90 | 6.87 | 5.94 | 5.53 | 5.57 |
| hsa-miR-212 | hsa-miR-212_st2 | 9.94 | 6.26 | 5.68 | 6.18 | 5.71 | 5.14 | 5.05 | 4.57 |
| hsa-miR-153 | hsa-miR-153_st2 | 6.56 | 2.41 | 1.74 | 1.89 | 1.28 | 2.93 | 1.76 | 2.47 |
| hsa-miR-139 | hsa-miR-139_st2 | 13.32 | 10.99 | 9.36 | 9.56 | 9.74 | 8.42 | 8.94 | 9.34 |
| hsa-miR-381 | hsa-miR-381_st2 | 7.43 | 2.75 | 2.32 | 4.21 | 3.38 | 4.17 | 2.94 | 3.48 |
| hsa-miR-409-3p | hsa-miR-409-3p_st1 | 8.07 | 2.22 | 3.42 | 5.14 | 4.98 | 4.73 | 2.94 | 3.95 |
| hsa-asg-9757 | hsa-asg-9757_st1 | 6.40 | 2.41 | 1.15 | 2.15 | 1.79 | 1.80 | 2.23 | 2.90 |
| hsa-asg-2364 | hsa-asg-2364_st1 | 5.74 | 1.05 | 0.97 | 0.66 | 2.00 | 1.35 | 1.39 | 2.77 |
| hsa-asg-5021 | hsa-asg-5021_st1 | 8.84 | 5.17 | 4.38 | 7.00 | 6.05 | 5.88 | 3.48 | 4.57 |
| hsa-asg-4471 | hsa-asg-4471_st1 | 6.81 | 1.63 | 2.97 | 2.84 | 2.98 | 2.79 | 2.49 | 2.62 |
| hsa-miR-204 | hsa-miR-204_st2 | 10.36 | 7.17 | 5.77 | 5.98 | 8.20 | 6.73 | 5.40 | 5.17 |
| hsa-miR-128a | hsa-miR-128a_st2 | 13.48 | 10.77 | 9.31 | 9.72 | 9.95 | 8.83 | 8.94 | 9.00 |
| hsa-miR-105 | hsa-miR-105_st1 | 6.15 | 1.63 | 1.34 | 2.63 | 0.82 | 2.72 | 1.39 | 2.47 |
| hsa-asg-13254 | hsa-asg-13254_st1 | 8.98 | 5.58 | 5.32 | 6.66 | 5.89 | 5.87 | 3.97 | 4.71 |
| hsa-asg-10304 | hsa-asg-10304_st1 | 6.36 | 1.43 | 1.54 | 1.89 | 2.48 | 2.33 | 1.95 | 2.14 |
| hsa-cand660 | hsa-cand660_st1 | 6.18 | 2.22 | 1.74 | 1.37 | 1.48 | 2.65 | 1.57 | 2.77 |
| hsa-miR-369-5p | hsa-asg-1521_st1 | 7.42 | 3.73 | 3.36 | 4.01 | 2.20 | 3.68 | 3.68 | 3.38 |
| hsa-miR-369-5p | hsa-miR-369-5p_st2 | 7.18 | 3.53 | 2.67 | 4.46 | 4.35 | 4.33 | 2.49 | 2.90 |
| hsa-asg-12824 | hsa-asg-12824_st1 | 6.20 | 2.03 | 1.74 | 3.04 | 1.90 | 2.49 | 1.57 | 2.62 |
| hsa-asg-924 | hsa-asg-924_st1 | 7.41 | 4.64 | 4.25 | 3.38 | 4.44 | 2.65 | 2.73 | 2.14 |
| hsa-asg-9303 | hsa-asg-9303_st2 | 6.19 | 1.43 | 2.67 | 1.12 | 3.05 | 2.93 | 1.86 | 2.62 |
| hsa-miR-128b | hsa-miR-128b_st1 | 13.63 | 11.26 | 9.78 | 10.01 | 10.35 | 9.17 | 9.27 | 9.53 |
| hsa-miR-184 | hsa-miR-184_st1 | 7.97 | 5.50 | 4.50 | 4.11 | 4.28 | 3.89 | 5.11 | 1.60 |
| hsa-miR-370 | hsa-miR-370_st1 | 8.69 | 4.64 | 5.23 | 4.71 | 5.05 | 4.69 | 5.34 | 4.31 |
| hsa-asg-7465 | hsa-asg-7465_st2 | 8.69 | 4.64 | 4.31 | 4.01 | 6.17 | 5.05 | 4.15 | 5.14 |
| hsa-asg-9365 | hsa-asg-9365_st2 | 6.26 | 3.31 | 2.13 | 1.89 | 2.48 | 2.49 | 2.32 | 2.77 |
| hsa-asg-6667 | hsa-asg-6667_st1 | 5.54 | 2.41 | 2.13 | 2.40 | 0.57 | 1.89 | 1.76 | 1.42 |
| hsa-miR-491 | hsa-miR-491_st1 | 9.24 | 5.24 | 6.12 | 5.04 | 5.61 | 5.51 | 5.70 | 5.12 |
| hsa-miR-134 | hsa-miR-134_st2 | 8.91 | 5.09 | 5.73 | 6.00 | 5.84 | 5.67 | 4.15 | 4.71 |
| hsa-miR-154 | hsa-miR-154_st2 | 7.18 | 3.73 | 2.50 | 4.30 | 4.35 | 4.88 | 3.08 | 3.15 |
| hsa-asg-9514 | hsa-asg-9514_st1 | 7.14 | 2.58 | 4.50 | 3.21 | 2.48 | 4.33 | 3.63 | 4.18 |
| hsa-miR-187 | hsa-miR-187_st1 | 7.00 | 4.74 | 2.75 | 2.74 | 3.75 | 3.18 | 3.32 | 3.03 |
| hsa-miR-409-5p | hsa-miR-409-5p_st1 | 9.29 | 5.13 | 4.98 | 6.68 | 6.08 | 6.08 | 5.11 | 5.90 |
| hsa-asg-5455 | hsa-asg-5455_st2 | 5.83 | 2.41 | 2.97 | 3.04 | 0.90 | 2.16 | 1.95 | 1.78 |
| hsa-miR-376a | hsa-miR-376a_st2 | 7.97 | 5.13 | 4.03 | 5.49 | 5.66 | 4.82 | 3.97 | 2.47 |
| hsa-miR-376a | hsa-asg-14234_st1 | 7.18 | 3.31 | 4.25 | 3.38 | 3.98 | 4.82 | 3.63 | 2.90 |
| hsa-miR-376a | hsa-asg-10049_st1 | 8.33 | 5.01 | 4.85 | 6.09 | 5.55 | 5.31 | 4.05 | 3.83 |
| hsa-asg-14020 | hsa-asg-14020_st2 | 5.51 | 1.63 | 2.97 | 1.12 | 2.00 | 2.16 | 1.39 | 1.09 |
| hsa-asg-2637 | hsa-asg-2637_st1 | 7.67 | 4.35 | 4.14 | 4.96 | 4.53 | 4.24 | 3.38 | 3.38 |
| hsa-asg-9971 | hsa-asg-9971_st2 | 7.11 | 4.29 | 3.48 | 2.84 | 3.71 | 3.59 | 3.32 | 4.18 |
| hsa-miR-7 | hsa-miR-7_st1 | 12.00 | 9.45 | 8.18 | 9.71 | 8.61 | 8.16 | 7.65 | 8.64 |
| hsa-miR-577 | hsa-miR-577_st1 | 6.15 | 4.59 | 2.83 | 3.21 | 2.98 | 2.79 | 1.39 | 1.96 |
| hsa-asg-12250 | hsa-asg-12250_st2 | 5.40 | 2.75 | 2.13 | 1.89 | 1.48 | 1.98 | 1.76 | 2.31 |
| hsa-asg-10106 | hsa-asg-10106_st1 | 5.51 | 3.31 | 2.32 | 1.63 | 1.28 | 2.41 | 1.76 | 1.96 |
| hsa-asg-10439 | hsa-asg-10439_st1 | 5.46 | 2.22 | 1.94 | 2.84 | 1.69 | 2.16 | 1.57 | 1.96 |
| hsa-asg-14176 | hsa-asg-14176_st1 | 8.76 | 6.05 | 5.67 | 5.28 | 6.77 | 6.23 | 5.37 | 5.44 |
| hsa-asg-10916 | hsa-asg-10916_st2 | 5.64 | 2.58 | 2.32 | 2.63 | 2.10 | 2.79 | 1.76 | 2.90 |
| hsa-asg-11880 | hsa-asg-11880_st1 | 5.69 | 3.73 | 2.50 | 2.15 | 2.30 | 2.79 | 2.32 | 2.90 |
| hsa-miR-181d | hsa-asg-13508_st1 | 9.23 | 6.60 | 5.77 | 6.86 | 6.60 | 5.60 | 5.62 | 5.67 |
| hsa-asg-8067 | hsa-asg-8067_st2 | 9.14 | 6.66 | 6.35 | 5.82 | 6.62 | 6.65 | 5.69 | 5.30 |
| hsa-miR-299-3p | hsa-asg-10378_st1 | 5.90 | 3.64 | 3.36 | 3.21 | 1.90 | 2.41 | 1.95 | 1.60 |
| hsa-miR-299-3p | hsa-miR-299-3p_st2 | 5.91 | 2.41 | 3.36 | 3.38 | 2.90 | 3.40 | 2.73 | 3.27 |
| hsa-asg-12177 | hsa-asg-12177_st2 | 6.79 | 4.74 | 3.36 | 3.52 | 4.62 | 3.06 | 3.93 | 3.03 |
| hsa-asg-13496 | hsa-asg-13496_st1 | 6.15 | 3.18 | 2.50 | 2.40 | 3.44 | 3.12 | 3.32 | 3.27 |
| hsa-asg-14159 | hsa-asg-14159_st2 | 6.37 | 3.18 | 2.83 | 3.78 | 4.17 | 2.57 | 2.65 | 3.03 |
| hsa-miR-499 | hsa-miR12_st1 | 7.95 | 5.44 | 4.76 | 5.37 | 6.66 | 4.07 | 4.38 | 4.80 |
| hsa-miR-499 | hsa-miR-499_st1 | 7.66 | 5.31 | 4.61 | 4.75 | 6.57 | 4.49 | 4.12 | 5.03 |
| hsa-cand165 | hsa-cand165_st1 | 6.70 | 4.22 | 4.18 | 3.21 | 4.14 | 3.55 | 4.19 | 1.60 |
| hsa-miR-628 | hsa-miR-628_st2 | 10.66 | 8.29 | 7.83 | 7.21 | 8.00 | 7.32 | 7.47 | 7.23 |
| hsa-asg-2261 | hsa-asg-2261_st1 | 6.05 | 3.53 | 3.11 | 2.84 | 2.98 | 2.86 | 3.63 | 1.60 |
| hsa-miR-494 | hsa-miR-494_st1 | 9.66 | 6.39 | 7.25 | 7.23 | 6.95 | 6.60 | 7.61 | 5.71 |
| hsa-miR-494 | hsa-miR61_st2 | 8.90 | 6.81 | 6.50 | 6.86 | 6.42 | 6.35 | 7.05 | 5.38 |
| hsa-miR-340 | hsa-miR-340_st1 | 7.65 | 5.81 | 4.94 | 5.24 | 5.70 | 4.86 | 4.41 | 4.47 |
| hsa-miR-504 | hsa-miR-504_st1 | 7.39 | 4.29 | 4.74 | 2.52 | 5.95 | 5.81 | 4.22 | 3.83 |
| hsa-miR-181d | hsa-miR-181d_st1 | 11.20 | 9.12 | 7.78 | 8.91 | 8.92 | 7.57 | 7.91 | 8.26 |
| hsa-miR-181d | hsa-miR74_st1 | 10.79 | 8.96 | 8.17 | 9.00 | 8.79 | 7.99 | 8.20 | 8.08 |
| hsa-asg-5083 | hsa-asg-5083_st1 | 5.31 | 2.58 | 2.32 | 2.40 | 2.48 | 2.33 | 2.14 | 2.90 |
| hsa-miR-189 | hsa-miR-189_st1 | 8.21 | 6.07 | 5.74 | 4.93 | 7.23 | 6.15 | 4.49 | 4.92 |
| hsa-asg-11040 | hsa-asg-11040_st2 | 5.57 | 2.75 | 2.32 | 3.38 | 2.30 | 2.99 | 2.94 | 3.27 |
| hsa-asg-1388 | hsa-asg-1388_st1 | 5.59 | 2.03 | 3.58 | 2.15 | 2.10 | 3.55 | 2.80 | 2.62 |
| hsa-asg-13258 | hsa-asg-13258_st2 | 10.65 | 9.04 | 8.90 | 7.04 | 8.65 | 7.48 | 8.01 | 7.17 |
| hsa-asg-13646 | hsa-asg-13646_st1 | 10.04 | 8.23 | 8.08 | 6.97 | 7.98 | 6.52 | 7.51 | 6.66 |
| hsa-asg-13231 | hsa-asg-13231_st1 | 6.22 | 3.91 | 4.11 | 4.21 | 4.44 | 2.93 | 3.38 | 1.78 |
| hsa-asg-11949 | hsa-asg-11949_st1 | 6.89 | 4.88 | 4.55 | 4.01 | 3.94 | 3.68 | 3.93 | 3.15 |
| hsa-asg-14175 | hsa-asg-14175_st1 | 8.88 | 6.55 | 6.31 | 6.43 | 7.06 | 6.07 | 6.08 | 5.57 |
| hsa-asg-12515 | hsa-asg-12515_st2 | 6.56 | 4.00 | 4.25 | 3.04 | 4.10 | 4.57 | 4.32 | 3.66 |
| hsa-miR-331 | hsa-asg-14205_st1 | 9.01 | 7.52 | 5.80 | 7.38 | 7.77 | 6.83 | 4.72 | 6.62 |
| hsa-miR-331 | hsa-miR-331_st2 | 10.34 | 9.03 | 7.52 | 8.36 | 8.78 | 7.66 | 7.04 | 7.68 |
| hsa-asg-4283 | hsa-asg-4283_st2 | 5.72 | 3.91 | 3.48 | 2.63 | 3.80 | 3.89 | 2.80 | 3.48 |
| hsa-miR-181b | hsa-miR-181b_st2 | 13.01 | 11.22 | 10.43 | 10.98 | 10.87 | 9.81 | 10.26 | 10.24 |
| hsa-cand208 | hsa-cand208_st1 | 5.51 | 2.58 | 3.48 | 3.04 | 3.12 | 3.29 | 3.53 | 1.78 |
| hsa-miR-218 | hsa-miR-218_st2 | 11.23 | 9.61 | 9.22 | 8.83 | 9.68 | 9.13 | 8.59 | 7.75 |
| hsa-asg-13878 | hsa-asg-13878_st2 | 5.64 | 2.90 | 3.48 | 2.84 | 4.82 | 4.24 | 3.32 | 3.03 |
| hsa-miR-551b | hsa-miR167_st2 | 6.77 | 5.24 | 4.38 | 3.78 | 5.84 | 3.35 | 3.97 | 4.80 |
| hsa-miR-551b | hsa-miR-551b_st1 | 6.30 | 4.79 | 4.81 | 4.87 | 4.75 | 3.97 | 2.65 | 4.12 |
| hsa-asg-4553 | hsa-asg-4553_st1 | 5.92 | 2.41 | 2.97 | 3.66 | 4.14 | 4.07 | 3.81 | 3.03 |
| hsa-miR-181a* | hsa-miR-213_st1 | 8.20 | 6.29 | 6.17 | 5.68 | 5.71 | 5.42 | 5.37 | 5.30 |
| hsa-asg-3376 | hsa-asg-3376_st1 | 6.21 | 3.83 | 2.97 | 4.87 | 4.65 | 3.97 | 4.12 | 2.47 |
| hsa-asg-2335 | hsa-asg-2335_st1 | 5.49 | 4.00 | 2.97 | 4.11 | 2.98 | 2.93 | 2.32 | 3.57 |
| hsa-asg-4439 | hsa-asg-4439_st2 | 5.67 | 3.83 | 4.31 | 3.21 | 2.66 | 1.62 | 3.63 | 2.77 |
| hsa-miR-421 | hsa-asg-5033_st2 | 10.55 | 8.21 | 8.07 | 8.49 | 8.61 | 7.77 | 7.98 | 7.76 |
| hsa-miR-421 | hsa-miR-421-3p_st1 | 11.25 | 9.49 | 9.15 | 8.99 | 9.42 | 8.68 | 8.78 | 8.36 |
| hsa-miR-31 | hsa-miR-31_st2 | 11.57 | 10.40 | 9.74 | 8.95 | 10.15 | 8.68 | 8.54 | 7.71 |
| hsa-cand244 | hsa-cand244_st1 | 7.02 | 5.44 | 4.58 | 4.84 | 4.38 | 4.86 | 5.28 | 4.36 |
| hsa-asg-12164 | hsa-asg-12164_st2 | 6.21 | 4.64 | 4.31 | 5.45 | 4.06 | 2.99 | 2.65 | 4.05 |
| hsa-miR-324-5p | hsa-miR-324-5p_st1 | 10.20 | 7.91 | 8.08 | 8.34 | 8.26 | 7.77 | 7.37 | 7.80 |
| hsa-asg-8476 | hsa-asg-8476_st1 | 8.27 | 5.58 | 6.36 | 6.43 | 6.32 | 5.75 | 6.17 | 6.75 |
| hsa-miR-654 | hsa-asg-33_st1 | 6.74 | 3.18 | 6.20 | 5.09 | 4.51 | 4.41 | 5.15 | 4.57 |
| hsa-asg-8776 | hsa-asg-8776_st2 | 5.64 | 3.83 | 2.83 | 4.38 | 3.94 | 2.57 | 3.89 | 2.90 |
| hsa-asg-8266 | hsa-asg-8266_st2 | 6.36 | 4.15 | 3.78 | 4.61 | 5.22 | 4.41 | 4.70 | 4.47 |
| hsa-asg-879 | hsa-asg-879_st1 | 5.49 | 3.91 | 2.97 | 3.66 | 4.21 | 2.86 | 3.63 | 2.90 |
| hsa-cand330 | hsa-cand330_st2 | 6.18 | 4.74 | 4.98 | 3.52 | 4.70 | 5.12 | 4.12 | 2.62 |
| hsa-asg-12183 | hsa-asg-12183_st1 | 5.91 | 4.69 | 4.03 | 4.11 | 3.94 | 4.14 | 4.41 | 1.96 |
| hsa-miR-181c | hsa-miR-181c_st1 | 10.81 | 9.24 | 8.57 | 9.33 | 9.09 | 8.64 | 7.66 | 9.05 |
| hsa-asg-13279 | hsa-asg-13279_st1 | 9.08 | 7.57 | 7.42 | 7.55 | 8.17 | 7.21 | 6.54 | 6.86 |
| hsa-asg-4294 | hsa-asg-4294_st2 | 5.37 | 4.29 | 3.11 | 4.54 | 4.06 | 3.18 | 3.08 | 2.31 |
| hsa-cand443 | hsa-cand443_st2 | 6.40 | 3.91 | 5.10 | 3.90 | 4.48 | 5.73 | 5.21 | 4.84 |
| hsa-asg-191 | hsa-asg-191_st1 | 5.49 | 3.31 | 3.86 | 2.84 | 3.55 | 3.81 | 4.05 | 3.98 |
| hsa-asg-14138 | hsa-asg-14138_st2 | 6.64 | 5.76 | 4.52 | 5.35 | 5.49 | 4.88 | 5.26 | 4.12 |
| hsa-miR-99b | hsa-miR-99b_st1 | 12.28 | 10.99 | 10.46 | 10.53 | 11.45 | 11.1 | 10.08 | 10.15 |
| hsa-miR-99b | hsa-asg-14196_st2 | 12.35 | 11.28 | 10.60 | 10.63 | 11.69 | 11.2 | 10.27 | 10.31 |
| hsa-asg-4493 | hsa-asg-4493_st1 | 5.40 | 4.22 | 3.36 | 4.46 | 2.98 | 3.59 | 4.05 | 2.77 |
| hsa-asg-12179 | hsa-asg-12179_st1 | 6.98 | 6.15 | 4.98 | 5.45 | 5.67 | 5.36 | 4.88 | 4.80 |
| hsa-asg-1467 | hsa-asg-1467_st2 | 6.69 | 6.03 | 5.28 | 3.66 | 5.24 | 4.92 | 5.43 | 5.10 |
| hsa-asg-9646 | hsa-asg-9646_st2 | 5.49 | 4.59 | 3.48 | 4.38 | 3.80 | 3.29 | 3.81 | 3.91 |
| hsa-asg-13293 | hsa-asg-13293_st1 | 5.43 | 3.91 | 3.24 | 4.21 | 4.10 | 4.47 | 2.94 | 3.83 |
| hsa-miR-425-3p | hsa-miR-425_st2 | 7.87 | 6.58 | 6.61 | 6.42 | 6.87 | 6.40 | 5.96 | 5.84 |
| hsa-asg-3145 | hsa-asg-3145_st1 | 7.04 | 5.66 | 5.14 | 5.28 | 6.40 | 6.22 | 5.53 | 4.96 |
| hsa-asg-3405 | hsa-asg-3405_st1 | 5.46 | 4.07 | 4.03 | 3.78 | 4.41 | 3.81 | 3.63 | 3.66 |
| hsa-asg-6543 | hsa-asg-6543_st1 | 5.46 | 4.22 | 3.58 | 4.11 | 4.25 | 4.30 | 3.89 | 3.48 |
| hsa-asg-13471 | hsa-asg-13471_st1 | 6.18 | 4.74 | 4.71 | 4.38 | 5.11 | 5.31 | 5.34 | 4.36 |
| hsa-asg-11199 | hsa-asg-11199_st2 | 13.06 | 12.25 | 11.85 | 11.24 | 12.28 | 11.9 | 11.42 | 11.31 |
| hsa-asg-6050 | hsa-asg-6050_st2 | 5.40 | 3.73 | 4.25 | 3.52 | 3.55 | 4.57 | 4.25 | 3.48 |
| hsa-miR-376a* | hsa-miR-376a-_st2 | 5.92 | 4.79 | 4.11 | 5.33 | 5.11 | 4.49 | 4.38 | 3.75 |
| hsa-miR-98 | hsa-miR-98_st1 | 12.38 | 11.57 | 11.02 | 11.17 | 11.57 | 11.0 | 10.83 | 10.89 |
| hsa-asg-7507 | hsa-asg-7507_st2 | 5.92 | 3.73 | 4.50 | 4.46 | 4.32 | 4.47 | 5.07 | 4.05 |
| hsa-miR-185 | hsa-miR-185_st2 | 12.00 | 11.04 | 10.95 | 11.29 | 10.68 | 10.0 | 10.19 | 10.45 |
| hsa-asg-2460 | hsa-asg-2460_st1 | 5.74 | 4.47 | 4.18 | 4.93 | 4.75 | 3.59 | 4.12 | 4.47 |
| hsa-asg-5134 | hsa-asg-5134_st2 | 5.83 | 4.93 | 4.50 | 4.87 | 4.35 | 4.94 | 4.25 | 4.80 |
| hsa-miR-181a | hsa-miR-181a_st1 | 13.32 | 12.53 | 11.68 | 12.28 | 12.46 | 11.9 | 11.25 | 12.00 |
| hsa-asg-4438 | hsa-asg-4438_st2 | 5.81 | 4.53 | 4.50 | 5.04 | 4.53 | 4.11 | 4.49 | 4.18 |
| hsa-let-7e | hsa-let-7e_st1 | 13.47 | 12.65 | 12.76 | 12.35 | 12.64 | 12.2 | 12.64 | 12.01 |
| hsa-asg-10626 | hsa-asg-10626_st2 | 6.02 | 5.13 | 5.14 | 4.61 | 5.36 | 4.96 | 4.25 | 4.84 |
| hsa-miR-324-3p | hsa-miR-324-3p_st1 | 8.51 | 7.65 | 7.25 | 7.35 | 8.09 | 7.53 | 6.86 | 7.39 |
| hsa-asg-7335 | hsa-asg-7335_st2 | 6.25 | 5.13 | 4.25 | 5.41 | 5.07 | 5.16 | 5.28 | 5.20 |
| hsa-asg-917 | hsa-asg-917_st2 | 6.26 | 5.69 | 5.25 | 4.61 | 4.89 | 5.89 | 4.79 | 5.00 |
| hsa-asg-12275 | hsa-asg-12275_st1 | 7.39 | 5.90 | 5.72 | 6.76 | 6.49 | 6.43 | 6.32 | 6.19 |
| hsa-asg-6462 | hsa-asg-6462_st1 | 6.46 | 5.47 | 5.77 | 5.41 | 6.08 | 5.66 | 4.70 | 5.20 |
| hsa-asg-8485 | hsa-asg-8485_st1 | 5.83 | 4.47 | 4.90 | 4.99 | 5.20 | 4.80 | 4.19 | 4.57 |
| hsa-asg-11764 | hsa-asg-11764_st1 | 6.23 | 5.01 | 5.50 | 5.77 | 5.81 | 4.94 | 4.70 | 5.14 |
| hsa-miR-222 | hsa-miR-222_st2 | 10.72 | 10.40 | 9.52 | 9.55 | 10.21 | 9.72 | 9.28 | 9.50 |

| | LNneg | | | | | | | |
|---|---|---|---|---|---|---|---|---|
| MicroRNA | 8 | 9 | M | SD | % | ttest | log2Diff | Fold |
| hsa-miR-124a | 3.40 | 4.82 | 3.54 | 0.87 | 0 | 3.46E−06 | 10.3 | 1307 |
| hsa-miR-124a | 3.61 | 4.37 | 3.81 | 0.77 | 0 | 1.82E−06 | 9.95 | 986 |
| hsa-asg-13159 | 2.05 | 3.84 | 3.18 | 0.70 | 0 | 6.44E−07 | 10.3 | 1270 |
| hsa-miR-433 | 1.66 | 2.89 | 2.80 | 1.00 | 0 | 8.60E−05 | 7.70 | 207.8 |
| hsa-asg-13404 | 1.09 | 2.29 | 2.82 | 1.29 | 0 | 5.95E−04 | 7.44 | 173.3 |
| hsa-miR-383 | 2.58 | 1.36 | 2.46 | 0.71 | 0 | 1.04E−05 | 7.24 | 151.3 |
| hsa-asg-3373 | 1.85 | 1.83 | 2.78 | 0.96 | 0 | 1.08E−04 | 7.10 | 137.1 |
| hsa-miR-129 | 4.55 | 4.37 | 4.57 | 0.40 | 0 | 1.90E−07 | 6.90 | 119.7 |
| hsa-miR-487b | 3.71 | 4.37 | 5.58 | 1.11 | 67 | 3.79E−04 | 6.86 | 115.9 |
| hsa-miR202 | 2.41 | 3.06 | 3.45 | 0.88 | 0 | 7.68E−05 | 6.83 | 114.0 |
| hsa-miR-323 | 2.89 | 3.22 | 3.90 | 0.98 | 0 | 1.68E−04 | 6.82 | 112.8 |
| hsa-miR-329 | 2.74 | 3.06 | 3.16 | 0.84 | 0 | 7.69E−05 | 6.56 | 94.6 |
| hsa-miR-329 | 3.29 | 2.71 | 3.41 | 0.74 | 0 | 3.02E−05 | 6.53 | 92.7 |
| hsa-miR-329 | 2.58 | 3.50 | 3.58 | 0.59 | 0 | 8.74E−06 | 6.23 | 75.2 |
| hsa-miR-485-3p | 2.74 | 3.06 | 3.24 | 0.66 | 0 | 1.36E−05 | 6.53 | 92.4 |
| hsa-miR-485-3p | 3.51 | 3.84 | 3.74 | 0.51 | 0 | 4.24E−06 | 5.94 | 61.4 |
| hsa-miR-539 | 2.58 | 1.36 | 2.52 | 0.63 | 0 | 1.03E−05 | 6.49 | 90.1 |
| hsa-miR-539 | 1.66 | 2.07 | 2.19 | 0.63 | 0 | 1.38E−05 | 6.23 | 75.0 |
| hsa-miR-9 | 3.29 | 4.13 | 3.29 | 0.55 | 0 | 3.88E−06 | 6.42 | 85.4 |
| hsa-miR-9 | 1.66 | 3.62 | 2.79 | 0.63 | 0 | 2.86E−05 | 5.60 | 48.5 |
| hsa-cand26 | 4.04 | 5.44 | 4.98 | 0.91 | 22 | 1.59E−04 | 6.39 | 83.8 |
| hsa-miR-410 | 1.85 | 2.51 | 2.51 | 0.68 | 0 | 2.03E−05 | 6.39 | 83.7 |
| hsa-miR-149 | 3.35 | 3.14 | 3.04 | 1.03 | 0 | 3.80E−04 | 6.35 | 81.7 |
| hsa-asg-13135 | 4.44 | 5.57 | 5.11 | 0.44 | 22 | 7.39E−07 | 6.35 | 81.6 |
| hsa-asg-4574 | 3.29 | 3.06 | 3.38 | 0.63 | 0 | 1.17E−05 | 6.35 | 81.4 |
| hsa-miR-495 | 2.41 | 4.87 | 5.23 | 1.36 | 56 | 2.41E−03 | 6.26 | 76.4 |
| hsa-miR-485-5p | 1.85 | 3.50 | 3.08 | 0.68 | 0 | 2.64E−05 | 6.14 | 70.5 |
| hsa-miR-432 | 4.25 | 2.71 | 4.80 | 1.13 | 22 | 9.21E−04 | 6.08 | 67.5 |
| hsa-miR-487a | 2.23 | 2.89 | 2.50 | 0.73 | 0 | 5.28E−05 | 6.01 | 64.6 |
| hsa-miR-487a | 3.71 | 3.62 | 3.72 | 0.20 | 0 | 9.79E−09 | 5.08 | 33.9 |
| hsa-asg-10881 | 5.01 | 5.20 | 5.19 | 0.55 | 22 | 8.15E−06 | 5.82 | 56.6 |
| hsa-miR-338 | 3.40 | 4.87 | 4.30 | 1.04 | 11 | 7.55E−04 | 5.80 | 55.6 |
| hsa-miR-137 | 3.29 | 2.89 | 2.68 | 0.56 | 0 | 1.07E−05 | 5.69 | 51.8 |
| hsa-miR-346 | 4.63 | 3.14 | 3.27 | 0.88 | 0 | 3.28E−04 | 5.58 | 48.0 |
| hsa-asg-7295 | 2.74 | 1.83 | 2.43 | 0.57 | 0 | 1.56E−05 | 5.56 | 47.2 |
| hsa-miR-411 | 2.23 | 2.07 | 3.83 | 1.27 | 11 | 3.31E−03 | 5.54 | 46.6 |
| hsa-miR-592 | 2.58 | 4.51 | 2.94 | 0.96 | 0 | 6.38E−04 | 5.46 | 44.0 |
| hsa-miR-592 | 1.66 | 5.40 | 2.89 | 1.21 | 11 | 2.99E−03 | 5.35 | 40.9 |
| hsa-miR-330 | 5.03 | 4.48 | 5.22 | 0.59 | 22 | 2.57E−05 | 5.39 | 42.0 |
| hsa-miR-330 | 5.44 | 4.17 | 5.27 | 0.57 | 0 | 2.37E−05 | 5.23 | 37.4 |
| hsa-asg-13166 | 2.05 | 4.04 | 3.94 | 0.88 | 0 | 4.39E−04 | 5.35 | 40.7 |
| hsa-asg-5617 | 1.46 | 1.60 | 2.78 | 1.03 | 0 | 1.24E−03 | 5.27 | 38.6 |
| hsa-asg-4201 | 2.05 | 1.60 | 1.95 | 0.43 | 0 | 2.54E−06 | 5.27 | 38.5 |
| hsa-asg-7472 | 0.92 | 0.93 | 1.97 | 0.85 | 0 | 4.08E−04 | 5.17 | 36.1 |
| hsa-miR-299-5p | 2.41 | 3.94 | 4.74 | 1.40 | 44 | 8.03E−03 | 5.17 | 36.1 |
| hsa-miR-328 | 4.66 | 3.73 | 4.96 | 1.94 | 0 | 3.51E−02 | 5.17 | 36.0 |
| hsa-asg-10202 | 3.35 | 1.71 | 3.09 | 1.22 | 0 | 3.91E−03 | 5.17 | 36.0 |
| hsa-asg-3985 | 3.03 | 2.29 | 2.07 | 0.68 | 0 | 9.34E−05 | 5.16 | 35.7 |
| hsa-miR-127 | 5.47 | 5.42 | 6.51 | 1.03 | 56 | 1.57E−03 | 5.10 | 34.4 |
| hsa-miR-380-3p | 0.76 | 1.83 | 1.57 | 0.67 | 0 | 9.91E−05 | 5.03 | 32.7 |
| hsa-miR-380-3p | 1.28 | 2.07 | 2.00 | 0.72 | 0 | 3.46E−04 | 4.52 | 22.9 |
| hsa-asg-14178 | 3.17 | 2.29 | 1.86 | 1.14 | 0 | 3.07E−03 | 5.03 | 32.6 |
| hsa-miR-9* | 4.71 | 5.20 | 5.55 | 0.53 | 44 | 1.98E−05 | 5.03 | 32.6 |
| hsa-asg-13284 | 3.75 | 2.40 | 3.87 | 1.29 | 0 | 6.51E−03 | 4.95 | 30.8 |
| hsa-miR-379 | 6.13 | 6.20 | 6.58 | 0.37 | 100 | 1.39E−06 | 4.93 | 30.5 |
| hsa-miR-138 | 4.87 | 5.09 | 5.62 | 0.80 | 33 | 4.11E−04 | 4.88 | 29.4 |
| hsa-cand206 | 1.28 | 2.71 | 2.65 | 0.86 | 0 | 6.69E−04 | 4.86 | 29.0 |
| hsa-miR-584 | 5.88 | 5.82 | 5.85 | 0.31 | 67 | 4.79E−07 | 4.75 | 27.0 |
| hsa-miR-132 | 8.42 | 6.86 | 8.31 | 0.74 | 89 | 2.88E−04 | 4.75 | 26.9 |
| hsa-miR-382 | 5.91 | 5.79 | 6.70 | 0.61 | 78 | 9.77E−05 | 4.62 | 24.5 |
| hsa-miR-154* | 3.17 | 4.37 | 4.31 | 0.79 | 11 | 5.45E−04 | 4.61 | 24.5 |
| hsa-miR-598 | 3.03 | 5.02 | 5.61 | 1.12 | 56 | 4.63E−03 | 4.59 | 24.1 |
| hsa-miR-212 | 4.95 | 4.73 | 5.36 | 0.61 | 11 | 1.06E−04 | 4.57 | 23.8 |
| hsa-miR-153 | 1.46 | 2.07 | 2.00 | 0.52 | 0 | 3.46E−05 | 4.56 | 23.5 |
| hsa-miR-139 | 7.34 | 5.90 | 8.84 | 1.48 | 100 | 2.10E−02 | 4.47 | 22.2 |
| hsa-miR-381 | 1.28 | 3.22 | 3.08 | 0.91 | 0 | 1.98E−03 | 4.35 | 20.4 |
| hsa-miR-409-3p | 2.58 | 3.73 | 3.75 | 1.06 | 0 | 4.66E−03 | 4.32 | 20.0 |
| hsa-asg-9757 | 2.05 | 2.29 | 2.09 | 0.49 | 0 | 2.99E−05 | 4.31 | 19.8 |
| hsa-asg-2364 | 1.46 | 1.36 | 1.45 | 0.62 | 0 | 1.72E−04 | 4.29 | 19.6 |
| hsa-asg-5021 | 3.03 | 2.07 | 4.63 | 1.58 | 22 | 3.54E−02 | 4.21 | 18.5 |
| hsa-asg-4471 | 2.41 | 2.89 | 2.63 | 0.43 | 0 | 1.42E−05 | 4.19 | 18.2 |
| hsa-miR-204 | 5.40 | 5.76 | 6.18 | 1.00 | 44 | 4.11E−03 | 4.18 | 18.2 |
| hsa-miR-128a | 8.75 | 8.66 | 9.33 | 0.70 | 100 | 4.82E−04 | 4.15 | 17.8 |
| hsa-miR-105 | 2.23 | 2.71 | 1.99 | 0.71 | 0 | 5.42E−04 | 4.15 | 17.8 |
| hsa-asg-13254 | 2.41 | 3.36 | 4.86 | 1.37 | 56 | 2.17E−02 | 4.11 | 17.3 |
| hsa-asg-10304 | 3.40 | 3.22 | 2.26 | 0.68 | 0 | 4.62E−04 | 4.09 | 17.1 |
| hsa-cand660 | 2.58 | 2.71 | 2.12 | 0.58 | 0 | 1.61E−04 | 4.06 | 16.7 |
| hsa-miR-369-5p | 2.74 | 3.50 | 3.36 | 0.56 | 0 | 1.30E−04 | 4.05 | 16.6 |
| hsa-miR-369-5p | 2.58 | 3.50 | 3.42 | 0.81 | 0 | 2.22E−03 | 3.75 | 13.5 |
| hsa-asg-12824 | 2.23 | 1.83 | 2.16 | 0.48 | 0 | 4.21E−05 | 4.04 | 16.4 |
| hsa-asg-924 | 2.74 | 3.50 | 3.38 | 0.89 | 0 | 2.73E−03 | 4.03 | 16.3 |
| hsa-asg-9303 | 2.58 | 1.36 | 2.18 | 0.74 | 0 | 8.86E−04 | 4.01 | 16.1 |
| hsa-miR-128b | 9.18 | 9.23 | 9.75 | 0.70 | 100 | 7.64E−04 | 3.88 | 14.7 |
| hsa-miR-184 | 3.80 | 4.13 | 4.10 | 1.09 | 11 | 9.85E−03 | 3.87 | 14.6 |
| hsa-miR-370 | 4.47 | 5.09 | 4.84 | 0.36 | 0 | 6.89E−06 | 3.86 | 14.5 |
| hsa-asg-7465 | 5.20 | 5.02 | 4.86 | 0.66 | 11 | 5.99E−04 | 3.83 | 14.2 |
| hsa-asg-9365 | 2.74 | 2.07 | 2.47 | 0.43 | 0 | 3.26E−05 | 3.80 | 13.9 |
| hsa-asg-6667 | 1.85 | 1.36 | 1.76 | 0.58 | 0 | 2.57E−04 | 3.78 | 13.8 |
| hsa-miR-491 | 5.48 | 5.44 | 5.47 | 0.33 | 0 | 4.37E−06 | 3.77 | 13.6 |
| hsa-miR-134 | 4.29 | 5.00 | 5.16 | 0.68 | 0 | 8.41E−04 | 3.74 | 13.4 |
| hsa-miR-154 | 1.28 | 3.94 | 3.47 | 1.10 | 0 | 1.27E−02 | 3.72 | 13.1 |
| hsa-asg-9514 | 2.58 | 3.36 | 3.43 | 0.79 | 0 | 2.04E−03 | 3.71 | 13.1 |
| hsa-miR-187 | 3.35 | 3.14 | 3.33 | 0.61 | 0 | 4.69E−04 | 3.67 | 12.7 |
| hsa-miR-409-5p | 5.43 | 5.24 | 5.63 | 0.58 | 44 | 3.34E−04 | 3.66 | 12.7 |
| hsa-asg-5455 | 2.74 | 1.83 | 2.20 | 0.68 | 0 | 9.61E−04 | 3.63 | 12.4 |
| hsa-miR-376a | 3.80 | 3.73 | 4.34 | 1.02 | 0 | 9.77E−03 | 3.62 | 12.3 |
| hsa-miR-376a | 4.04 | 1.83 | 3.57 | 0.86 | 0 | 4.15E−03 | 3.61 | 12.2 |
| hsa-miR-376a | 4.12 | 4.64 | 4.83 | 0.75 | 11 | 2.24E−03 | 3.50 | 11.3 |
| hsa-asg-14020 | 1.76 | 3.06 | 1.91 | 0.73 | 0 | 1.51E−03 | 3.61 | 12.2 |
| hsa-asg-2637 | 3.84 | 4.33 | 4.13 | 0.52 | 0 | 1.98E−04 | 3.54 | 11.6 |
| hsa-asg-9971 | 4.12 | 3.62 | 3.68 | 0.46 | 0 | 1.05E−04 | 3.43 | 10.8 |
| hsa-miR-7 | 8.56 | 8.46 | 8.60 | 0.64 | 100 | 9.79E−04 | 3.40 | 10.6 |
| hsa-miR-577 | 2.05 | 3.22 | 2.78 | 0.92 | 0 | 8.63E−03 | 3.37 | 10.3 |
| hsa-asg-12250 | 2.05 | 2.07 | 2.05 | 0.35 | 0 | 1.80E−05 | 3.35 | 10.2 |
| hsa-asg-10106 | 2.58 | 2.51 | 2.20 | 0.61 | 0 | 8.32E−04 | 3.32 | 10.0 |
| hsa-asg-10439 | 2.05 | 2.89 | 2.15 | 0.46 | 0 | 1.28E−04 | 3.31 | 9.9 |
| hsa-asg-14176 | 4.19 | 4.13 | 5.46 | 0.88 | 44 | 7.19E−03 | 3.31 | 9.9 |
| hsa-asg-10916 | 2.23 | 1.83 | 2.35 | 0.41 | 0 | 5.85E−05 | 3.29 | 9.8 |
| hsa-asg-11880 | 1.28 | 2.07 | 2.45 | 0.67 | 0 | 1.83E−03 | 3.24 | 9.5 |
| hsa-miR-181d | 5.79 | 5.51 | 6.00 | 0.52 | 67 | 3.90E−04 | 3.23 | 9.4 |
| hsa-asg-8067 | 5.28 | 5.38 | 5.97 | 0.60 | 33 | 1.03E−03 | 3.17 | 9.0 |
| hsa-miR-299-3p | 3.17 | 3.50 | 2.75 | 0.78 | 0 | 5.13E−03 | 3.15 | 8.9 |
| hsa-miR-299-3p | 1.85 | 2.89 | 2.91 | 0.52 | 0 | 6.22E−04 | 3.00 | 8.0 |
| hsa-asg-12177 | 3.51 | 3.06 | 3.65 | 0.65 | 0 | 1.86E−03 | 3.14 | 8.8 |
| hsa-asg-13496 | 3.03 | 3.06 | 3.04 | 0.36 | 0 | 3.42E−05 | 3.11 | 8.6 |
| hsa-asg-14159 | 2.89 | 4.37 | 3.28 | 0.67 | 0 | 2.28E−03 | 3.10 | 8.6 |
| hsa-miR-499 | 4.55 | 3.84 | 4.87 | 0.85 | 22 | 9.02E−03 | 3.08 | 8.5 |
| hsa-miR-499 | 4.25 | 4.58 | 4.86 | 0.74 | 22 | 6.98E−03 | 2.81 | 7.0 |
| hsa-cand165 | 3.80 | 3.84 | 3.64 | 0.84 | 0 | 8.36E−03 | 3.06 | 8.3 |
| hsa-miR-628 | 7.64 | 7.43 | 7.60 | 0.37 | 100 | 5.28E−05 | 3.06 | 8.3 |
| hsa-asg-2261 | 3.03 | 3.36 | 3.00 | 0.59 | 0 | 1.22E−03 | 3.06 | 8.3 |
| hsa-miR-494 | 5.84 | 6.58 | 6.68 | 0.64 | 100 | 2.30E−03 | 2.97 | 7.9 |
| hsa-miR-494 | 5.77 | 6.87 | 6.45 | 0.55 | 89 | 2.94E−03 | 2.45 | 5.5 |
| hsa-miR-340 | 3.97 | 2.71 | 4.68 | 0.95 | 11 | 1.82E−02 | 2.97 | 7.8 |
| hsa-miR-504 | 3.56 | 5.26 | 4.46 | 1.11 | 0 | 3.67E−02 | 2.92 | 7.6 |
| hsa-miR-181d | 8.20 | 8.00 | 8.30 | 0.56 | 100 | 1.15E−03 | 2.91 | 7.5 |
| hsa-miR-181d | 8.15 | 7.86 | 8.36 | 0.44 | 100 | 7.47E−04 | 2.43 | 5.4 |
| hsa-asg-5083 | 2.58 | 2.07 | 2.42 | 0.25 | 0 | 4.77E−06 | 2.89 | 7.4 |
| hsa-miR-189 | 3.51 | 4.92 | 5.33 | 1.09 | 44 | 3.64E−02 | 2.88 | 7.4 |
| hsa-asg-11040 | 2.23 | 2.07 | 2.69 | 0.48 | 0 | 4.74E−04 | 2.87 | 7.3 |
| hsa-asg-1388 | 2.41 | 3.50 | 2.75 | 0.64 | 0 | 3.03E−03 | 2.84 | 7.2 |
| hsa-asg-13258 | 6.22 | 7.92 | 7.82 | 0.94 | 100 | 2.18E−02 | 2.82 | 7.1 |
| hsa-asg-13646 | 6.05 | 7.10 | 7.23 | 0.76 | 100 | 8.27E−03 | 2.80 | 7.0 |
| hsa-asg-13231 | 2.05 | 4.44 | 3.47 | 1.01 | 0 | 3.28E−02 | 2.75 | 6.7 |
| hsa-asg-11949 | 4.44 | 4.87 | 4.16 | 0.57 | 0 | 1.93E−03 | 2.73 | 6.6 |
| hsa-asg-14175 | 5.91 | 6.23 | 6.25 | 0.42 | 89 | 3.52E−04 | 2.64 | 6.2 |
| hsa-asg-12515 | 4.12 | 3.73 | 3.98 | 0.45 | 0 | 6.04E−04 | 2.58 | 6.0 |
| hsa-miR-331 | 5.44 | 5.91 | 6.44 | 1.04 | 56 | 4.71E−02 | 2.57 | 5.9 |
| hsa-miR-331 | 7.26 | 7.18 | 7.83 | 0.72 | 100 | 1.08E−02 | 2.51 | 5.7 |
| hsa-asg-4283 | 2.23 | 2.51 | 3.19 | 0.65 | 0 | 6.25E−03 | 2.52 | 5.8 |
| hsa-miR-181b | 10.46 | 10.1 | 10.4 | 0.45 | 100 | 7.18E−04 | 2.52 | 5.7 |
| hsa-cand208 | 3.97 | 2.51 | 3.03 | 0.66 | 0 | 7.09E−03 | 2.48 | 5.6 |
| hsa-miR-218 | 7.43 | 8.74 | 8.77 | 0.77 | 100 | 1.63E−02 | 2.46 | 5.5 |
| hsa-asg-13878 | 2.41 | 1.83 | 3.21 | 0.90 | 0 | 3.38E−02 | 2.43 | 5.4 |
| hsa-miR-551b | 3.51 | 4.29 | 4.35 | 0.82 | 22 | 2.34E−02 | 2.42 | 5.3 |
| hsa-miR-551b | 2.89 | 4.37 | 4.14 | 0.84 | 0 | 4.03E−02 | 2.16 | 4.5 |
| hsa-asg-4553 | 3.80 | 3.73 | 3.51 | 0.58 | 0 | 4.34E−03 | 2.40 | 5.3 |
| hsa-miR-181a* | 5.77 | 6.53 | 5.80 | 0.43 | 56 | 8.02E−04 | 2.39 | 5.2 |
| hsa-asg-3376 | 4.19 | 3.36 | 3.82 | 0.77 | 0 | 1.90E−02 | 2.39 | 5.2 |
| hsa-asg-2335 | 2.23 | 2.89 | 3.11 | 0.66 | 0 | 9.37E−03 | 2.37 | 5.2 |
| hsa-asg-4439 | 3.71 | 4.04 | 3.31 | 0.84 | 0 | 2.86E−02 | 2.36 | 5.1 |
| hsa-miR-421 | 8.76 | 8.05 | 8.19 | 0.36 | 100 | 2.57E−04 | 2.36 | 5.1 |
| hsa-miR-421 | 9.37 | 8.90 | 9.02 | 0.38 | 100 | 5.16E−04 | 2.23 | 4.7 |
| hsa-miR-31 | 8.66 | 10.0 | 9.21 | 0.92 | 100 | 4.03E−02 | 2.36 | 5.1 |
| hsa-cand244 | 4.63 | 3.89 | 4.70 | 0.48 | 0 | 1.67E−03 | 2.32 | 5.0 |
| hsa-asg-12164 | 4.12 | 2.89 | 3.91 | 0.91 | 0 | 4.29E−02 | 2.31 | 4.9 |
| hsa-miR-324-5p | 7.85 | 7.97 | 7.93 | 0.29 | 100 | 6.99E−05 | 2.27 | 4.8 |
| hsa-asg-8476 | 5.40 | 5.61 | 6.04 | 0.47 | 11 | 1.95E−03 | 2.23 | 4.7 |
| hsa-miR-654 | 4.19 | 3.62 | 4.55 | 0.89 | 11 | 4.64E−02 | 2.20 | 4.6 |
| hsa-asg-8776 | 3.51 | 3.22 | 3.45 | 0.61 | 0 | 9.13E−03 | 2.19 | 4.6 |
| hsa-asg-8266 | 3.40 | 3.84 | 4.29 | 0.55 | 0 | 7.51E−03 | 2.07 | 4.2 |
| hsa-asg-879 | 2.74 | 3.84 | 3.42 | 0.55 | 0 | 7.00E−03 | 2.07 | 4.2 |
| hsa-cand330 | 3.97 | 3.94 | 4.19 | 0.80 | 11 | 4.54E−02 | 1.99 | 4.0 |
| hsa-asg-12183 | 3.97 | 4.21 | 3.94 | 0.78 | 0 | 4.35E−02 | 1.97 | 3.9 |
| hsa-miR-181c | 8.69 | 9.81 | 8.90 | 0.61 | 100 | 1.72E−02 | 1.92 | 3.8 |
| hsa-asg-13279 | 6.98 | 6.66 | 7.22 | 0.52 | 100 | 9.24E−03 | 1.86 | 3.6 |
| hsa-asg-4294 | 4.19 | 3.06 | 3.53 | 0.75 | 0 | 4.92E−02 | 1.84 | 3.6 |
| hsa-cand443 | 3.80 | 4.29 | 4.59 | 0.68 | 33 | 3.45E−02 | 1.82 | 3.5 |
| hsa-asg-191 | 3.17 | 4.82 | 3.71 | 0.58 | 0 | 1.95E−02 | 1.78 | 3.4 |
| hsa-asg-14138 | 3.93 | 4.54 | 4.87 | 0.64 | 0 | 3.00E−02 | 1.77 | 3.4 |
| hsa-miR-99b | 9.51 | 10.3 | 10.5 | 0.60 | 100 | 2.35E−02 | 1.76 | 3.4 |
| hsa-miR-99b | 9.53 | 10.5 | 10.6 | 0.65 | 100 | 4.17E−02 | 1.67 | 3.2 |
| hsa-asg-4493 | 3.80 | 3.62 | 3.65 | 0.56 | 0 | 1.76E−02 | 1.75 | 3.4 |
| hsa-asg-12179 | 5.01 | 5.32 | 5.29 | 0.43 | 11 | 6.02E−03 | 1.69 | 3.2 |
| hsa-asg-1467 | 4.71 | 4.64 | 5.00 | 0.65 | 11 | 4.04E−02 | 1.68 | 3.2 |
| hsa-asg-9646 | 3.40 | 3.73 | 3.82 | 0.43 | 0 | 6.43E−03 | 1.66 | 3.2 |
| hsa-asg-13293 | 3.88 | 3.36 | 3.77 | 0.49 | 0 | 1.29E−02 | 1.66 | 3.2 |
| hsa-miR-425-3p | 6.24 | 5.26 | 6.24 | 0.49 | 89 | 1.33E−02 | 1.63 | 3.1 |
| hsa-asg-3145 | 4.44 | 5.32 | 5.44 | 0.61 | 33 | 3.65E−02 | 1.60 | 3.0 |
| hsa-asg-3405 | 3.29 | 4.13 | 3.87 | 0.33 | 0 | 1.87E−03 | 1.59 | 3.0 |
| hsa-asg-6543 | 3.71 | 3.36 | 3.88 | 0.36 | 0 | 3.06E−03 | 1.58 | 3.0 |
| hsa-asg-13471 | 4.04 | 3.50 | 4.61 | 0.61 | 11 | 4.08E−02 | 1.57 | 3.0 |
| hsa-asg-11199 | 10.45 | 11.4 | 11.5 | 0.58 | 100 | 4.17E−02 | 1.48 | 2.8 |
| hsa-asg-6050 | 4.32 | 3.73 | 3.93 | 0.41 | 0 | 9.66E−03 | 1.47 | 2.8 |
| hsa-miR-376a* | 3.97 | 4.21 | 4.46 | 0.53 | 0 | 3.05E−02 | 1.46 | 2.7 |
| hsa-miR-98 | 10.16 | 10.6 | 10.9 | 0.44 | 100 | 1.72E−02 | 1.39 | 2.6 |
| hsa-asg-7507 | 4.89 | 5.40 | 4.54 | 0.51 | 0 | 3.45E−02 | 1.37 | 2.6 |
| hsa-miR-185 | 11.24 | 10.2 | 10.6 | 0.47 | 100 | 2.84E−02 | 1.32 | 2.5 |
| hsa-asg-2460 | 4.75 | 4.76 | 4.45 | 0.42 | 0 | 1.97E−02 | 1.29 | 2.4 |
| hsa-asg-5134 | 3.80 | 4.44 | 4.54 | 0.38 | 0 | 1.26E−02 | 1.29 | 2.4 |
| hsa-miR-181a | 12.10 | 12.5 | 12.0 | 0.43 | 100 | 2.72E−02 | 1.23 | 2.3 |
| hsa-asg-4438 | 4.80 | 5.32 | 4.61 | 0.39 | 0 | 1.90E−02 | 1.20 | 2.3 |
| hsa-let-7e | 11.33 | 11.8 | 12.2 | 0.48 | 100 | 4.48E−02 | 1.20 | 2.3 |
| hsa-asg-10626 | 4.25 | 4.97 | 4.84 | 0.39 | 0 | 2.07E−02 | 1.18 | 2.3 |
| hsa-miR-324-3p | 6.63 | 7.25 | 7.33 | 0.42 | 0 | 3.01E−02 | 1.17 | 2.3 |
| hsa-asg-7335 | 5.09 | 5.28 | 5.10 | 0.34 | 22 | 1.18E−02 | 1.15 | 2.2 |
| hsa-asg-917 | 4.85 | 5.20 | 5.13 | 0.43 | 33 | 3.52E−02 | 1.13 | 2.2 |
| hsa-asg-12275 | 6.43 | 6.56 | 6.31 | 0.33 | 100 | 1.44E−02 | 1.07 | 2.1 |
| hsa-asg-6462 | 4.80 | 5.40 | 5.39 | 0.44 | 44 | 5.00E−02 | 1.07 | 2.1 |
| hsa-asg-8485 | 5.13 | 4.87 | 4.79 | 0.33 | 0 | 1.63E−02 | 1.04 | 2.1 |
| hsa-asg-11764 | 5.13 | 4.76 | 5.20 | 0.41 | 22 | 4.44E−02 | 1.04 | 2.0 |
| hsa-miR-222 | 9.37 | 9.84 | 9.71 | 0.38 | 100 | 3.53E−02 | 1.01 | 2.0 |

SD, standard deviation;
%, percentage of samples expressing miRNA above background levels;
Log2Diff, difference in VSN-transformed expression bewteen BRN and LNneg samples.

### Example 35

### miRNAs Differentally Expressed Between Normal Thymus Tissue and Normal Lymph Nodes

[0343] To identify miRNAs that may be useful markers for metastasis of cancerous thymus cells to lymph nodes, the inventors identified miRNAs that are expressed at significantly higher levels in normal thymus tissue than in cancer-negative lymph nodes.

[0344] Total RNA, purified from one normal human thymus sample (FirstChoice® Human Thymus Total RNA, cat. no. AM7964; Ambion, Austin, Tex., USA) and from nine normal human lymph node samples (FirstChoice® Human Lymph Node Total RNA, cat. no. AM7894; Ambion, Austin, Tex., USA) was purchased from Ambion. miRNA purification and labeling and microarray expression analyses were performed as described above in Example 2.

[0345] The inventors identified 108 miRNAs (44 verified, 64 predicted) with significant differential expression between the normal thymus and normal lymph node samples (|log 2Diff|thymus vs LN neg≧1 and p-value<0.05) (Table 34). Among the verified miRNAs, hsa-miR-205 was expressed at a level over 300-fold higher in the thymus sample; hsa-miR-383 and -429 were expressed at levels between 50- and 70-fold higher in thymus; 15 miRNAs were expressed at levels between 10- and 40-fold higher in thymus; and 15 miRNAs were expressed at levels between 5- and 10-fold higher in the thymus sample than in normal lymph nodes. Among the predicted miRNAs, hsa-asg-14153_st2 was expressed at a level over 50-fold higher in the thymus sample; 6 miRNAs (hsa-miR-7637_st2, -13404 st2, -1088_st1, -11715_st2, -3711 st2, and hsa-miR202_st2) were expressed at levels between 10- and 30-fold higher in thymus; and 17 miRNAs were expressed at levels between 5- and 10-fold higher in the thymus samples than in normal lymph nodes.

TABLE 34
MicroRNAs Differentially Expressed Between Normal Thymus Samples (TMS) and
Cancer-Negative Lymph Node Samples (LNneg) from Patients.

| | Probe | | LNneg | | | | | |
|---|---|---|---|---|---|---|---|---|
| MicroRNA | ID | TMS | 1 | 2 | 3 | 4 | 5 | 6 |
| hsa-miR-205 | hsa-miR-205_st1 | 12.96 | 2.90 | 5.86 | 5.64 | 2.00 | 3.55 | 6.06 |
| hsa-miR-383 | hsa-miR-383_st1 | 8.51 | 3.31 | 2.83 | 2.40 | 2.57 | 3.18 | 1.30 |
| hsa-miR-429 | hsa-miR-429_st1 | 8.74 | 3.42 | 1.54 | 3.66 | 2.10 | 2.33 | 2.65 |
| hsa-asg-14153 | hsa-asg-14153_st2 | 8.51 | 3.05 | 2.23 | 3.04 | 2.98 | 2.33 | 2.65 |
| hsa-miR-200a | hsa-miR-200a_st2 | 10.75 | 6.26 | 5.02 | 6.49 | 5.71 | 5.25 | 4.54 |
| hsa-miR-200b | hsa-miR-200b_st1 | 12.84 | 7.61 | 7.75 | 8.91 | 6.69 | 6.79 | 6.82 |
| hsa-miR-183 | hsa-miR-183_st1 | 11.95 | 7.65 | 6.71 | 6.71 | 7.93 | 7.54 | 5.78 |
| hsa-miR-96 | hsa-miR-96_st1 | 8.13 | 4.97 | 3.36 | 3.04 | 2.98 | 4.07 | 2.80 |
| hsa-asg-7637 | hsa-asg-7637_st2 | 8.66 | 3.64 | 2.50 | 4.46 | 3.44 | 3.89 | 3.97 |
| hsa-miR-375 | hsa-miR-375_st1 | 8.79 | 5.95 | 4.88 | 6.24 | 2.82 | 2.93 | 3.63 |
| hsa-asg-13404 | hsa-asg-13404_st2 | 7.28 | 4.15 | 2.67 | 5.28 | 2.90 | 3.24 | 1.57 |
| hsa-miR-203 | hsa-miR-203_st2 | 11.16 | 7.32 | 5.84 | 7.22 | 8.24 | 6.42 | 5.36 |
| hsa-miR-495 | hsa-miR-495_st1 | 9.49 | 6.01 | 4.76 | 6.97 | 6.25 | 6.29 | 4.38 |
| hsa-miR-200c | hsa-miR-200c_st1 | 13.29 | 9.59 | 8.79 | 10.31 | 8.17 | 8.12 | 8.08 |
| hsa-miR-149 | hsa-miR-149_st2 | 7.17 | 4.47 | 3.82 | 1.76 | 4.14 | 2.72 | 1.48 |
| hsa-miR-493-5p | hsa-miR-493-5p_st1 | 8.74 | 4.35 | 3.78 | 6.89 | 6.18 | 6.30 | 3.63 |
| hsa-asg-1088 | hsa-asg-1088_st1 | 5.88 | 1.83 | 2.13 | 1.63 | 1.59 | 2.07 | 0.87 |
| hsa-asg-11715 | hsa-asg-11715_st2 | 5.84 | 1.83 | 2.32 | 2.15 | 1.48 | 2.07 | 1.76 |
| hsa-miR202 | hsa-miR202_st2 | 7.36 | 3.83 | 2.67 | 4.93 | 3.94 | 3.59 | 2.40 |
| hsa-miR-411 | hsa-miR-411_st1 | 7.69 | 4.84 | 3.68 | 4.54 | 5.22 | 5.52 | 2.94 |
| hsa-miR-487b | hsa-miR-487b_st2 | 9.32 | 6.05 | 5.79 | 6.97 | 6.90 | 6.22 | 5.34 |
| hsa-miR-182 | hsa-miR-182_st1 | 12.99 | 10.22 | 9.98 | 8.86 | 9.82 | 9.35 | 9.50 |
| hsa-miR-368 | hsa-miR-368_st2 | 9.77 | 6.48 | 6.47 | 7.70 | 8.08 | 7.68 | 5.18 |
| hsa-asg-3711 | hsa-asg-3711_st2 | 8.65 | 5.69 | 6.12 | 5.12 | 5.52 | 5.11 | 5.20 |
| hsa-miR-605 | hsa-miR-605_st1 | 5.97 | 2.58 | 2.13 | 3.04 | 0.73 | 1.71 | 2.14 |
| hsa-asg-10247 | hsa-asg-10247_st1 | 5.79 | 2.75 | 2.13 | 4.01 | 1.69 | 2.16 | 2.32 |
| hsa-miR-432 | hsa-miR-432_st2 | 8.02 | 4.53 | 5.38 | 5.93 | 5.52 | 5.74 | 5.62 |
| hsa-asg-12139 | hsa-asg-12139_st2 | 5.50 | 2.75 | 2.32 | 2.63 | 2.30 | 1.62 | 2.14 |
| hsa-asg-3807 | hsa-asg-3807_st1 | 6.33 | 3.05 | 3.36 | 3.04 | 3.94 | 3.85 | 1.67 |
| hsa-miR-200a* | hsa-miR-200a-_st2 | 5.83 | 3.05 | 2.83 | 2.15 | 3.89 | 2.57 | 1.76 |
| hsa-asg-8054 | hsa-asg-8054_st1 | 5.27 | 3.42 | 2.32 | 1.37 | 1.69 | 2.33 | 1.21 |
| hsa-miR-376a | hsa-asg-10049_st1 | 7.79 | 5.01 | 4.85 | 6.09 | 5.55 | 5.31 | 4.05 |
| hsa-miR-376a | hsa-miR-376a_st2 | 7.09 | 5.13 | 4.03 | 5.49 | 5.66 | 4.82 | 3.97 |
| hsa-miR-376a | hsa-asg-14234_st1 | 6.06 | 3.31 | 4.25 | 3.38 | 3.98 | 4.82 | 3.63 |
| hsa-asg-5119 | hsa-asg-5119_st1 | 5.45 | 2.41 | 2.67 | 1.89 | 1.90 | 1.98 | 2.49 |
| hsa-asg-13908 | hsa-asg-13908_st2 | 5.56 | 2.03 | 2.50 | 3.66 | 2.48 | 1.44 | 2.80 |
| hsa-miR-433 | hsa-miR-433_st2 | 5.67 | 2.41 | 2.67 | 4.54 | 2.90 | 4.17 | 2.32 |
| hsa-miR-485-3p | hsa-miR23_st2 | 6.09 | 4.29 | 2.50 | 4.11 | 3.25 | 2.41 | 3.20 |
| hsa-miR-485-3p | hsa-miR-485-3p_st2 | 6.06 | 3.64 | 2.97 | 4.30 | 4.41 | 4.24 | 3.08 |
| hsa-asg-9980 | hsa-asg-9980_st1 | 6.74 | 5.17 | 4.44 | 4.01 | 1.69 | 3.35 | 2.80 |
| hsa-asg-5721 | hsa-asg-5721_st2 | 5.33 | 2.22 | 3.36 | 2.15 | 3.12 | 1.98 | 2.32 |
| hsa-miR-369-5p | hsa-miR-369-5p_st2 | 6.21 | 3.53 | 2.67 | 4.46 | 4.35 | 4.33 | 2.49 |
| hsa-miR-369-5p | hsa-asg-1521_st1 | 5.92 | 3.73 | 3.36 | 4.01 | 2.20 | 3.68 | 3.68 |
| hsa-asg-4978 | hsa-asg-4978_st2 | 5.27 | 1.63 | 2.83 | 2.84 | 1.69 | 1.98 | 1.95 |
| hsa-miR-539 | hsa-miR-539_st1 | 5.30 | 2.03 | 3.11 | 2.63 | 3.38 | 2.65 | 2.94 |
| hsa-miR-127 | hsa-miR-127_st1 | 9.26 | 6.80 | 5.52 | 7.96 | 7.53 | 7.66 | 5.66 |
| hsa-asg-13705 | hsa-asg-13705_st1 | 5.01 | 1.63 | 0.97 | 3.78 | 2.30 | 2.65 | 2.32 |
| hsa-asg-8428 | hsa-asg-8428_st2 | 4.52 | 2.22 | 1.94 | 2.63 | 2.00 | 2.49 | 1.03 |
| hsa-miR-485-5p | hsa-miR-485-5p_st2 | 5.79 | 3.42 | 3.24 | 3.38 | 3.66 | 3.24 | 1.95 |
| hsa-miR-128a | hsa-miR-128a_st2 | 12.00 | 10.77 | 9.31 | 9.72 | 9.95 | 8.83 | 8.94 |
| hsa-miR-410 | hsa-miR-410_st1 | 5.13 | 2.41 | 2.32 | 1.37 | 3.71 | 2.49 | 2.80 |
| hsa-miR-128b | hsa-miR-128b_st1 | 12.36 | 11.26 | 9.78 | 10.01 | 10.3 | 9.17 | 9.27 |
| hsa-asg-10131 | hsa-asg-10131_st2 | 5.81 | 3.31 | 3.11 | 3.52 | 2.48 | 2.49 | 3.20 |
| hsa-asg-13166 | hsa-asg-13166_st2 | 6.53 | 4.47 | 3.36 | 4.87 | 4.94 | 4.07 | 4.12 |
| hsa-miR-141 | hsa-miR-141_st1 | 6.71 | 5.05 | 3.78 | 4.93 | 4.41 | 4.36 | 2.80 |
| hsa-asg-13997 | hsa-asg-13997_st2 | 5.04 | 3.05 | 3.24 | 2.15 | 2.98 | 2.16 | 2.32 |
| hsa-asg-8174 | hsa-asg-8174_st1 | 5.73 | 3.31 | 4.03 | 2.84 | 2.98 | 2.86 | 3.20 |
| hsa-miR-379 | hsa-miR-379_st1 | 9.04 | 6.51 | 6.37 | 7.12 | 6.96 | 7.01 | 6.54 |
| hsa-asg-3912 | hsa-asg-3912_st1 | 4.73 | 1.63 | 2.50 | 2.84 | 1.59 | 2.16 | 1.21 |
| hsa-asg-4219 | hsa-asg-4219_st1 | 4.87 | 3.42 | 1.74 | 1.63 | 1.48 | 2.24 | 1.76 |
| hsa-miR-329 | hsa-miR-329_st1 | 5.84 | 3.73 | 2.97 | 4.61 | 3.25 | 4.54 | 2.80 |
| hsa-miR-329 | hsa-asg-13204_st2 | 5.63 | 4.07 | 2.83 | 4.21 | 3.38 | 4.20 | 3.43 |
| hsa-cand206 | hsa-cand206_st1 | 4.94 | 2.22 | 1.94 | 3.78 | 3.60 | 2.65 | 2.14 |
| hsa-asg-1296 | hsa-asg-1296_st1 | 5.52 | 3.05 | 2.50 | 4.81 | 2.39 | 2.49 | 2.73 |
| hsa-asg-924 | hsa-asg-924_st1 | 5.65 | 4.64 | 4.25 | 3.38 | 4.44 | 2.65 | 2.73 |
| hsa-asg-10306 | hsa-asg-10306_st1 | 5.07 | 2.22 | 2.32 | 3.52 | 2.74 | 3.40 | 2.73 |
| hsa-asg-11160 | hsa-asg-11160_st2 | 5.38 | 2.75 | 3.11 | 3.38 | 3.05 | 2.86 | 2.65 |
| hsa-cand696 | hsa-cand696_st1 | 5.19 | 3.53 | 3.11 | 2.84 | 2.98 | 2.49 | 1.95 |
| hsa-miR-382 | hsa-miR-382_st1 | 8.84 | 7.16 | 6.80 | 7.35 | 7.13 | 7.40 | 6.51 |
| hsa-asg-1358 | hsa-asg-1358_st1 | 5.01 | 3.18 | 3.11 | 3.38 | 2.30 | 2.33 | 3.20 |
| hsa-asg-1596 | hsa-asg-1596_st2 | 6.33 | 4.41 | 5.06 | 4.01 | 3.19 | 4.36 | 4.12 |
| hsa-asg-4294 | hsa-asg-4294_st2 | 5.65 | 4.29 | 3.11 | 4.54 | 4.06 | 3.18 | 3.08 |
| hsa-asg-12880 | hsa-asg-12880_st1 | 8.95 | 8.00 | 6.95 | 5.74 | 6.87 | 7.96 | 6.98 |
| hsa-miR-132 | hsa-miR-132_st1 | 10.29 | 9.71 | 8.51 | 8.34 | 8.34 | 8.56 | 8.02 |
| hsa-miR-154* | hsa-miR-154-_st2 | 6.28 | 5.81 | 3.48 | 4.21 | 4.98 | 4.59 | 3.89 |
| hsa-asg-758 | hsa-asg-758_st1 | 7.97 | 6.45 | 6.59 | 5.07 | 6.13 | 7.04 | 6.24 |
| hsa-miR-134 | hsa-miR-134_st2 | 7.08 | 5.09 | 5.73 | 6.00 | 5.84 | 5.67 | 4.15 |
| hsa-miR-181d | hsa-miR-181d_st1 | 10.07 | 9.12 | 7.78 | 8.91 | 8.92 | 7.57 | 7.91 |
| hsa-miR-181d | hsa-miR74_st1 | 9.64 | 8.96 | 8.17 | 9.00 | 8.79 | 7.99 | 8.20 |
| hsa-miR-181b | hsa-miR-181b_st2 | 12.23 | 11.22 | 10.4 | 10.98 | 10.8 | 9.81 | 10.2 |
| hsa-asg-12177 | hsa-asg-12177_st2 | 5.35 | 4.74 | 3.36 | 3.52 | 4.62 | 3.06 | 3.93 |
| hsa-miR-181a* | hsa-miR-213_st1 | 7.50 | 6.29 | 6.17 | 5.68 | 5.71 | 5.42 | 5.37 |
| hsa-asg-8515 | hsa-asg-8515_st2 | 9.39 | 8.26 | 7.40 | 7.32 | 6.91 | 8.54 | 6.77 |
| hsa-asg-11361 | hsa-asg-11361_st2 | 5.04 | 2.75 | 3.48 | 3.38 | 3.25 | 3.59 | 3.32 |
| hsa-asg-5326 | hsa-asg-5326_st2 | 7.94 | 6.95 | 7.13 | 5.74 | 6.26 | 6.65 | 6.47 |
| hsa-asg-1306 | hsa-asg-1306_st2 | 5.92 | 4.07 | 4.58 | 3.72 | 3.94 | 4.86 | 3.81 |
| hsa-cand914 | hsa-cand914_st1 | 11.84 | 11.06 | 10.8 | 9.59 | 10.0 | 10.84 | 10.2 |
| hsa-asg-13598 | hsa-asg-13598_st1 | 7.16 | 5.58 | 6.43 | 4.96 | 5.53 | 6.03 | 6.27 |
| hsa-asg-7578 | hsa-asg-7578_st2 | 6.84 | 6.37 | 5.23 | 4.16 | 5.28 | 5.82 | 5.04 |
| hsa-miR-212 | hsa-miR-212_st2 | 6.94 | 6.26 | 5.68 | 6.18 | 5.71 | 5.14 | 5.05 |
| hsa-asg-10638 | hsa-asg-10638_st2 | 10.27 | 9.24 | 9.20 | 7.43 | 8.68 | 9.23 | 9.03 |
| hsa-asg-872 | hsa-asg-872_st2 | 8.23 | 7.32 | 7.06 | 5.45 | 7.16 | 6.76 | 6.81 |
| hsa-asg-10731 | hsa-asg-10731_st1 | 5.50 | 4.53 | 3.78 | 3.66 | 3.75 | 4.86 | 3.58 |
| hsa-asg-6883 | hsa-asg-6883_st1 | 5.73 | 4.59 | 4.18 | 5.09 | 4.44 | 3.59 | 4.35 |
| hsa-asg-4663 | hsa-asg-4663_st1 | 9.17 | 7.99 | 8.01 | 6.67 | 7.47 | 8.39 | 7.64 |
| hsa-asg-5444 | hsa-asg-5444_st2 | 5.67 | 4.07 | 5.02 | 3.52 | 4.17 | 4.04 | 5.07 |
| hsa-cand533 | hsa-cand533_st1 | 5.47 | 4.84 | 4.18 | 4.11 | 4.48 | 3.85 | 3.53 |
| hsa-miR-566 | hsa-miR-566_st1 | 7.21 | 6.72 | 6.12 | 5.12 | 5.83 | 6.11 | 6.10 |
| hsa-asg-3729 | hsa-asg-3729_st2 | 8.45 | 7.38 | 7.23 | 6.88 | 6.83 | 7.81 | 6.82 |
| hsa-asg-8568 | hsa-asg-8568_st1 | 10.93 | 10.10 | 10.1 | 9.53 | 9.55 | 10.29 | 10.0 |
| hsa-miR-487a | hsa-asg-6915_st1 | 4.91 | 4.07 | 3.58 | 3.90 | 3.38 | 3.85 | 3.72 |
| hsa-asg-3130 | hsa-asg-3130_st1 | 9.72 | 9.01 | 8.29 | 8.09 | 8.36 | 9.14 | 8.29 |
| hsa-asg-11729 | hsa-asg-11729_st2 | 9.24 | 8.50 | 8.40 | 8.13 | 7.84 | 8.47 | 7.83 |
| hsa-asg-10892 | hsa-asg-10892_st1 | 9.65 | 8.85 | 8.57 | 8.04 | 8.11 | 9.12 | 8.50 |
| hsa-asg-9874 | hsa-asg-9874_st1 | 11.38 | 10.31 | 10.5 | 9.69 | 9.95 | 10.92 | 10.1 |
| hsa-asg-12179 | hsa-asg-12179_st1 | 6.40 | 6.15 | 4.98 | 5.45 | 5.67 | 5.36 | 4.88 |
| hsa-miR-652 | hsa-miR-652_st1 | 10.56 | 9.77 | 9.23 | 9.20 | 9.98 | 9.11 | 9.01 |
| hsa-asg-4246 | hsa-asg-4246_st2 | 5.93 | 4.59 | 5.41 | 4.75 | 4.87 | 5.17 | 4.92 |
| hsa-asg-13604 | hsa-asg-13604_st1 | 9.69 | 8.97 | 8.88 | 8.07 | 8.16 | 9.26 | 8.81 |
| hsa-asg-8068 | hsa-asg-8068_st2 | 7.28 | 6.73 | 6.65 | 5.59 | 5.96 | 6.42 | 6.58 |
| hsa-asg-3722 | hsa-asg-3722_st1 | 9.93 | 9.12 | 9.51 | 9.24 | 8.61 | 8.85 | 8.99 |
| hsa-asg-3038 | hsa-asg-3038_st2 | 6.66 | 5.84 | 5.79 | 5.45 | 5.90 | 5.89 | 5.94 |

| | LNneg | | | | | | | | |
|---|---|---|---|---|---|---|---|---|---|
| MicroRNA | 7 | 8 | 9 | M | SD | % | ttest | log2Diff | Fold |
| hsa-miR-205 | 3.38 | 5.30 | 7.74 | 4.71 | 1.85 | 33 | 2.87E−03 | −8.24 | 302 |
| hsa-miR-383 | 2.62 | 2.58 | 1.36 | 2.46 | 0.71 | 0 | 3.86E−05 | −6.05 | 66.4 |
| hsa-miR-429 | 2.31 | 2.41 | 5.36 | 2.86 | 1.14 | 0 | 1.20E−03 | −5.88 | 58.8 |
| hsa-asg-14153 | 1.17 | 2.74 | 4.37 | 2.73 | 0.85 | 0 | 1.99E−04 | −5.79 | 55.2 |
| hsa-miR-200a | 4.05 | 4.75 | 7.76 | 5.54 | 1.15 | 67 | 2.60E−03 | −5.21 | 37.0 |
| hsa-miR-200b | 6.50 | 7.64 | 10.41 | 7.68 | 1.27 | 100 | 4.79E−03 | −5.17 | 35.9 |
| hsa-miR-183 | 7.50 | 6.30 | 6.63 | 6.97 | 0.72 | 89 | 1.69E−04 | −4.98 | 31.5 |
| hsa-miR-96 | 3.03 | 1.85 | 3.06 | 3.24 | 0.87 | 11 | 6.82E−04 | −4.89 | 29.6 |
| hsa-asg-7637 | 3.27 | 3.61 | 5.24 | 3.78 | 0.77 | 0 | 3.16E−04 | −4.88 | 29.4 |
| hsa-miR-375 | 1.00 | 4.61 | 6.37 | 4.27 | 1.82 | 0 | 4.63E−02 | −4.52 | 22.9 |
| hsa-asg-13404 | 2.14 | 1.09 | 2.29 | 2.82 | 1.29 | 0 | 1.11E−02 | −4.46 | 22.1 |
| hsa-miR-203 | 5.17 | 6.05 | 9.34 | 6.77 | 1.38 | 78 | 1.68E−02 | −4.39 | 21.0 |
| hsa-miR-495 | 5.14 | 2.41 | 4.87 | 5.23 | 1.36 | 56 | 1.80E−02 | −4.26 | 19.1 |
| hsa-miR-200c | 7.96 | 8.87 | 11.51 | 9.05 | 1.21 | 100 | 1.06E−02 | −4.25 | 19.0 |
| hsa-miR-149 | 2.47 | 3.35 | 3.14 | 3.04 | 1.03 | 0 | 5.15E−03 | −4.13 | 17.6 |
| hsa-miR-493-5p | 4.36 | 1.85 | 4.58 | 4.66 | 1.58 | 33 | 3.95E−02 | −4.08 | 16.9 |
| hsa-asg-1088 | 3.27 | 1.46 | 2.51 | 1.93 | 0.68 | 0 | 5.90E−04 | −3.95 | 15.5 |
| hsa-asg-11715 | 0.63 | 1.46 | 3.36 | 1.90 | 0.74 | 0 | 9.89E−04 | −3.95 | 15.4 |
| hsa-miR202 | 4.25 | 2.41 | 3.06 | 3.45 | 0.88 | 0 | 2.88E−03 | −3.91 | 15.0 |
| hsa-miR-411 | 3.38 | 2.23 | 2.07 | 3.83 | 1.27 | 11 | 2.05E−02 | −3.87 | 14.6 |
| hsa-miR-487b | 4.88 | 3.71 | 4.37 | 5.58 | 1.11 | 67 | 1.28E−02 | −3.73 | 13.3 |
| hsa-miR-182 | 8.97 | 8.56 | 8.11 | 9.26 | 0.70 | 100 | 9.59E−04 | −3.72 | 13.2 |
| hsa-miR-368 | 5.62 | 3.97 | 5.07 | 6.25 | 1.40 | 67 | 4.46E−02 | −3.52 | 11.5 |
| hsa-asg-3711 | 4.52 | 4.41 | 4.84 | 5.17 | 0.55 | 0 | 3.13E−04 | −3.48 | 11.2 |
| hsa-miR-605 | 2.90 | 3.03 | 4.44 | 2.52 | 1.03 | 0 | 1.33E−02 | −3.44 | 10.9 |
| hsa-asg-10247 | 0.37 | 3.17 | 3.94 | 2.50 | 1.14 | 0 | 2.54E−02 | −3.28 | 9.7 |
| hsa-miR-432 | 3.48 | 4.25 | 2.71 | 4.80 | 1.13 | 22 | 2.67E−02 | −3.22 | 9.3 |
| hsa-asg-12139 | 1.60 | 2.05 | 3.50 | 2.32 | 0.59 | 0 | 9.13E−04 | −3.18 | 9.0 |
| hsa-asg-3807 | 3.38 | 2.89 | 3.62 | 3.20 | 0.68 | 0 | 2.35E−03 | −3.13 | 8.8 |
| hsa-miR-200a* | 2.14 | 3.17 | 2.89 | 2.72 | 0.64 | 0 | 1.80E−03 | −3.11 | 8.6 |
| hsa-asg-8054 | 3.03 | 2.05 | 2.51 | 2.21 | 0.73 | 0 | 4.13E−03 | −3.06 | 8.3 |
| hsa-miR-376a | 3.83 | 4.12 | 4.64 | 4.83 | 0.75 | 11 | 5.75E−03 | −2.96 | 7.8 |
| hsa-miR-376a | 2.47 | 3.80 | 3.73 | 4.34 | 1.02 | 0 | 3.39E−02 | −2.75 | 6.7 |
| hsa-miR-376a | 2.90 | 4.04 | 1.83 | 3.57 | 0.86 | 0 | 2.57E−02 | −2.49 | 5.6 |
| hsa-asg-5119 | 2.90 | 2.58 | 3.62 | 2.49 | 0.55 | 0 | 9.79E−04 | −2.96 | 7.8 |
| hsa-asg-13908 | 2.62 | 2.41 | 3.73 | 2.63 | 0.72 | 0 | 4.85E−03 | −2.93 | 7.6 |
| hsa-miR-433 | 1.60 | 1.66 | 2.89 | 2.80 | 1.00 | 0 | 2.64E−02 | −2.88 | 7.3 |
| hsa-miR-485-3p | 3.57 | 2.74 | 3.06 | 3.24 | 0.66 | 0 | 3.41E−03 | −2.86 | 7.2 |
| hsa-miR-485-3p | 3.66 | 3.51 | 3.84 | 3.74 | 0.51 | 0 | 2.65E−03 | −2.32 | 5.0 |
| hsa-asg-9980 | 3.83 | 5.05 | 4.64 | 3.89 | 1.13 | 11 | 4.34E−02 | −2.85 | 7.2 |
| hsa-asg-5721 | 1.78 | 2.89 | 2.51 | 2.48 | 0.54 | 0 | 1.01E−03 | −2.84 | 7.2 |
| hsa-miR-369-5p | 2.90 | 2.58 | 3.50 | 3.42 | 0.81 | 0 | 1.11E−02 | −2.79 | 6.9 |
| hsa-miR-369-5p | 3.38 | 2.74 | 3.50 | 3.36 | 0.56 | 0 | 2.57E−03 | −2.55 | 5.9 |
| hsa-asg-4978 | 2.77 | 2.58 | 4.13 | 2.49 | 0.79 | 0 | 9.89E−03 | −2.78 | 6.9 |
| hsa-miR-539 | 1.96 | 2.58 | 1.36 | 2.52 | 0.63 | 0 | 3.09E−03 | −2.78 | 6.9 |
| hsa-miR-127 | 6.57 | 5.47 | 5.42 | 6.51 | 1.03 | 56 | 3.53E−02 | −2.75 | 6.7 |
| hsa-asg-13705 | 0.37 | 3.17 | 3.22 | 2.27 | 1.11 | 0 | 4.69E−02 | −2.74 | 6.7 |
| hsa-asg-8428 | 0.04 | 2.14 | 1.60 | 1.79 | 0.81 | 0 | 1.26E−02 | −2.73 | 6.6 |
| hsa-miR-485-5p | 3.48 | 1.85 | 3.50 | 3.08 | 0.68 | 0 | 5.36E−03 | −2.71 | 6.5 |
| hsa-miR-128a | 9.00 | 8.75 | 8.66 | 9.33 | 0.70 | 100 | 6.58E−03 | −2.68 | 6.4 |
| hsa-miR-410 | 3.15 | 1.85 | 2.51 | 2.51 | 0.68 | 0 | 6.52E−03 | −2.62 | 6.2 |
| hsa-miR-128b | 9.53 | 9.18 | 9.23 | 9.75 | 0.70 | 100 | 7.67E−03 | −2.61 | 6.1 |
| hsa-asg-10131 | 2.62 | 3.17 | 5.07 | 3.22 | 0.79 | 0 | 1.43E−02 | −2.59 | 6.0 |
| hsa-asg-13166 | 3.57 | 2.05 | 4.04 | 3.94 | 0.88 | 0 | 2.43E−02 | −2.58 | 6.0 |
| hsa-miR-141 | 3.83 | 3.80 | 4.51 | 4.16 | 0.69 | 0 | 8.27E−03 | −2.54 | 5.8 |
| hsa-asg-13997 | 1.25 | 3.17 | 2.29 | 2.51 | 0.65 | 0 | 6.17E−03 | −2.53 | 5.8 |
| hsa-asg-8174 | 2.77 | 2.74 | 4.13 | 3.21 | 0.53 | 0 | 1.95E−03 | −2.52 | 5.8 |
| hsa-miR-379 | 6.33 | 6.13 | 6.20 | 6.58 | 0.37 | 100 | 2.22E−04 | −2.46 | 5.5 |
| hsa-asg-3912 | 2.90 | 2.14 | 3.50 | 2.27 | 0.74 | 0 | 1.33E−02 | −2.45 | 5.5 |
| hsa-asg-4219 | 2.90 | 2.74 | 3.94 | 2.43 | 0.87 | 0 | 2.90E−02 | −2.44 | 5.4 |
| hsa-miR-329 | 2.77 | 3.29 | 2.71 | 3.41 | 0.74 | 0 | 1.39E−02 | −2.44 | 5.4 |
| hsa-miR-329 | 3.98 | 2.58 | 3.50 | 3.58 | 0.59 | 0 | 1.12E−02 | −2.05 | 4.2 |
| hsa-cand206 | 3.57 | 1.28 | 2.71 | 2.65 | 0.86 | 0 | 3.52E−02 | −2.29 | 4.9 |
| hsa-asg-1296 | 3.15 | 3.88 | 4.13 | 3.24 | 0.85 | 0 | 3.46E−02 | −2.28 | 4.9 |
| hsa-asg-924 | 2.14 | 2.74 | 3.50 | 3.38 | 0.89 | 0 | 4.30E−02 | −2.27 | 4.8 |
| hsa-asg-10306 | 3.38 | 2.05 | 3.06 | 2.82 | 0.55 | 0 | 4.67E−03 | −2.25 | 4.8 |
| hsa-asg-11160 | 2.47 | 3.51 | 5.11 | 3.21 | 0.79 | 0 | 3.13E−02 | −2.17 | 4.5 |
| hsa-cand696 | 3.48 | 3.80 | 3.22 | 3.05 | 0.57 | 0 | 7.09E−03 | −2.15 | 4.4 |
| hsa-miR-382 | 6.27 | 5.91 | 5.79 | 6.70 | 0.61 | 78 | 1.07E−02 | −2.14 | 4.4 |
| hsa-asg-1358 | 2.47 | 2.05 | 3.84 | 2.87 | 0.61 | 0 | 1.01E−02 | −2.14 | 4.4 |
| hsa-asg-1596 | 4.12 | 4.19 | 4.37 | 4.20 | 0.49 | 0 | 3.30E−03 | −2.13 | 4.4 |
| hsa-asg-4294 | 2.31 | 4.19 | 3.06 | 3.53 | 0.75 | 0 | 2.84E−02 | −2.12 | 4.3 |
| hsa-asg-12880 | 6.48 | 7.23 | 5.67 | 6.88 | 0.83 | 33 | 4.52E−02 | −2.07 | 4.2 |
| hsa-miR-132 | 8.00 | 8.42 | 6.86 | 8.31 | 0.74 | 89 | 3.42E−02 | −1.98 | 4.0 |
| hsa-miR-154* | 4.25 | 3.17 | 4.37 | 4.31 | 0.79 | 11 | 4.50E−02 | −1.97 | 3.9 |
| hsa-asg-758 | 5.41 | 6.52 | 4.79 | 6.03 | 0.76 | 67 | 4.19E−02 | −1.94 | 3.8 |
| hsa-miR-134 | 4.71 | 4.29 | 5.00 | 5.16 | 0.68 | 0 | 2.89E−02 | −1.92 | 3.8 |
| hsa-miR-181d | 8.26 | 8.20 | 8.00 | 8.30 | 0.56 | 100 | 1.67E−02 | −1.78 | 3.4 |
| hsa-miR-181d | 8.08 | 8.15 | 7.86 | 8.36 | 0.44 | 100 | 2.34E−02 | −1.29 | 2.4 |
| hsa-miR-181b | 10.2 | 10.46 | 10.13 | 10.4 | 0.45 | 100 | 6.29E−03 | −1.74 | 3.3 |
| hsa-asg-12177 | 3.03 | 3.51 | 3.06 | 3.65 | 0.65 | 0 | 3.85E−02 | −1.70 | 3.3 |
| hsa-miR-181a* | 5.30 | 5.77 | 6.53 | 5.80 | 0.43 | 56 | 5.97E−03 | −1.70 | 3.2 |
| hsa-asg-8515 | 7.71 | 8.26 | 8.11 | 7.70 | 0.63 | 100 | 3.51E−02 | −1.69 | 3.2 |
| hsa-asg-11361 | 3.83 | 2.58 | 4.29 | 3.39 | 0.52 | 0 | 1.62E−02 | −1.66 | 3.1 |
| hsa-asg-5326 | 5.52 | 6.55 | 5.32 | 6.29 | 0.63 | 67 | 3.82E−02 | −1.65 | 3.1 |
| hsa-asg-1306 | 4.18 | 5.41 | 4.17 | 4.31 | 0.55 | 0 | 2.34E−02 | −1.62 | 3.1 |
| hsa-cand914 | 9.80 | 10.58 | 9.10 | 10.2 | 0.65 | 100 | 4.72E−02 | −1.62 | 3.1 |
| hsa-asg-13598 | 4.31 | 5.47 | 5.38 | 5.55 | 0.66 | 22 | 4.85E−02 | −1.61 | 3.1 |
| hsa-asg-7578 | 5.14 | 5.55 | 4.67 | 5.25 | 0.64 | 11 | 4.62E−02 | −1.59 | 3.0 |
| hsa-miR-212 | 4.57 | 4.95 | 4.73 | 5.36 | 0.61 | 11 | 4.13E−02 | −1.57 | 3.0 |
| hsa-asg-10638 | 8.31 | 8.70 | 8.51 | 8.70 | 0.58 | 100 | 3.42E−02 | −1.57 | 3.0 |
| hsa-asg-872 | 6.77 | 6.82 | 5.82 | 6.66 | 0.62 | 33 | 4.38E−02 | −1.56 | 3.0 |
| hsa-asg-10731 | 3.48 | 3.71 | 4.44 | 3.98 | 0.50 | 0 | 1.98E−02 | −1.52 | 2.9 |
| hsa-asg-6883 | 4.18 | 3.51 | 4.58 | 4.28 | 0.49 | 0 | 2.36E−02 | −1.45 | 2.7 |
| hsa-asg-4663 | 7.42 | 8.45 | 7.49 | 7.73 | 0.55 | 100 | 3.81E−02 | −1.45 | 2.7 |
| hsa-asg-5444 | 4.42 | 4.61 | 3.50 | 4.27 | 0.57 | 0 | 4.83E−02 | −1.40 | 2.6 |
| hsa-cand533 | 3.48 | 4.04 | 4.21 | 4.08 | 0.43 | 0 | 1.51E−02 | −1.39 | 2.6 |
| hsa-miR-566 | 5.55 | 6.02 | 5.42 | 5.89 | 0.47 | 56 | 2.85E−02 | −1.33 | 2.5 |
| hsa-asg-3729 | 6.87 | 7.41 | 7.31 | 7.17 | 0.34 | 100 | 7.63E−03 | −1.28 | 2.4 |
| hsa-asg-8568 | 9.12 | 9.67 | 8.93 | 9.71 | 0.47 | 100 | 3.96E−02 | −1.22 | 2.3 |
| hsa-miR-487a | 3.66 | 3.71 | 3.62 | 3.72 | 0.20 | 0 | 5.12E−04 | −1.19 | 2.3 |
| hsa-asg-3130 | 8.46 | 9.00 | 8.31 | 8.55 | 0.39 | 100 | 2.11E−02 | −1.18 | 2.3 |
| hsa-asg-11729 | 8.00 | 8.02 | 7.68 | 8.10 | 0.30 | 78 | 7.02E−03 | −1.14 | 2.2 |
| hsa-asg-10892 | 8.17 | 8.85 | 8.56 | 8.53 | 0.37 | 22 | 2.14E−02 | −1.12 | 2.2 |
| hsa-asg-9874 | 9.78 | 10.56 | 10.41 | 10.2 | 0.41 | 100 | 3.09E−02 | −1.12 | 2.2 |
| hsa-asg-12179 | 4.80 | 5.01 | 5.32 | 5.29 | 0.43 | 11 | 4.18E−02 | −1.10 | 2.1 |
| hsa-miR-652 | 9.63 | 9.50 | 9.64 | 9.45 | 0.33 | 100 | 1.32E−02 | −1.10 | 2.1 |
| hsa-asg-4246 | 4.25 | 5.30 | 4.58 | 4.87 | 0.38 | 0 | 2.85E−02 | −1.06 | 2.1 |
| hsa-asg-13604 | 8.39 | 8.80 | 8.38 | 8.64 | 0.40 | 100 | 3.65E−02 | −1.06 | 2.1 |
| hsa-asg-8068 | 5.86 | 6.37 | 5.86 | 6.22 | 0.41 | 89 | 4.21E−02 | −1.05 | 2.1 |
| hsa-asg-3722 | 8.29 | 9.00 | 8.68 | 8.92 | 0.37 | 100 | 3.03E−02 | −1.01 | 2.0 |
| hsa-asg-3038 | 5.38 | 5.13 | 5.61 | 5.66 | 0.28 | 44 | 1.01E−02 | −1.00 | 2.0 |

SD, standard deviation;
%, percentage of samples expressing miRNA above background levels;
Log2Diff, difference in VSN-transformed expression bewteen TMS and LNneg samples.

### Example 36

### miRNAs Differentally Expressed Between Normal Trachea Tissue and Normal Lymph Nodes

[0346] To identify miRNAs that may be useful markers for metastasis of cancerous trachea cells to lymph nodes, the inventors identified miRNAs that are expressed at significantly higher levels in normal trachea tissue than in cancer-negative lymph nodes.

[0347] Total RNA, purified from one normal human trachea sample (FirstChoice® Human Trachea Total RNA, cat. no. AM6846; Ambion, Austin, Tex., USA) and from nine normal human lymph node samples (FirstChoice® Human Lymph Node Total RNA, cat. no. AM7894; Ambion, Austin, Tex., USA) was purchased from Ambion. miRNA purification and labeling and microarray expression analyses were performed as described above in Example 2.

[0348] The inventors identified 97 miRNAs (38 verified, 59 predicted) with significant differential expression between the normal trachea and normal lymph node samples (|log 2-Diff| trachea vs LN neg≧1 and p-value<0.05) (Table 35). Among the verified miRNAs, hsa-miR-375 and -205 were expressed at levels between 300- and 400-fold higher in the trachea sample; hsa-miR-429 was expressed at a level between 100- and 200-fold higher in trachea; hsa-miR-200a, -200b, and -449 were expressed at levels between 50- and 100-fold higher in trachea; 12 miRNas were expressed at levels between 10- and 50-fold higher in trachea; and 12 miRNAs were expressed at levels between 5- and 10-fold higher in the trachea sample than in normal lymph nodes. Among the predicted miRNAs, hsa-asg-13231 st1 and -14153_st2 were expressed at levels over 100-fold higher in the trachea sample; 4 miRNAs (hsa-asg-4439_st2, -9269_st2, -7637_st2, and cand150 st2) were expressed at levels between 50- and 100-fold higher in trachea; 17 miRNAs were expressed at levels between 10- and 30-fold higher in trachea; and 15 miRNAs were expressed at levels between 5- and 10-fold higher in the trachea sample than in normal lymph nodes.

TABLE 35
MicroRNAs Differentially Expressed Between Normal Trachea Samples (TRA) and
Cancer-Negative Lymph Node Samples (LNneg) from Patients.

| | Probe | | LNneg | | | | | |
|---|---|---|---|---|---|---|---|---|
| MicroRNA | ID | TRA | 1 | 2 | 3 | 4 | 5 | 6 |
| hsa-miR-375 | hsa-miR-375_st1 | 12.78 | 5.95 | 4.88 | 6.24 | 2.82 | 2.93 | 3.63 |
| hsa-miR-205 | hsa-miR-205_st1 | 13.08 | 2.90 | 5.86 | 5.64 | 2.00 | 3.55 | 6.06 |
| hsa-miR-429 | hsa-miR-429_st1 | 10.31 | 3.42 | 1.54 | 3.66 | 2.10 | 2.33 | 2.65 |
| hsa-asg-13231 | hsa-asg-13231_st1 | 10.38 | 3.91 | 4.11 | 4.21 | 4.44 | 2.93 | 3.38 |
| hsa-asg-14153 | hsa-asg-14153_st2 | 9.57 | 3.05 | 2.23 | 3.04 | 2.98 | 2.33 | 2.65 |
| hsa-asg-4439 | hsa-asg-4439_st2 | 9.86 | 3.83 | 4.31 | 3.21 | 2.66 | 1.62 | 3.63 |
| hsa-miR-200a | hsa-miR-200a_st2 | 12.02 | 6.26 | 5.02 | 6.49 | 5.71 | 5.25 | 4.54 |
| hsa-miR-200b | hsa-miR-200b_st1 | 13.63 | 7.61 | 7.75 | 8.91 | 6.69 | 6.79 | 6.82 |
| hsa-asg-9269 | hsa-asg-9269_st2 | 8.90 | 2.58 | 2.50 | 4.68 | 2.90 | 2.57 | 2.65 |
| hsa-asg-7637 | hsa-asg-7637_st2 | 9.65 | 3.64 | 2.50 | 4.46 | 3.44 | 3.89 | 3.97 |
| hsa-cand150 | hsa-cand150_st2 | 9.46 | 6.26 | 3.68 | 2.40 | 2.48 | 3.12 | 3.43 |
| hsa-miR-449 | hsa-miR-449_st2 | 8.38 | 2.58 | 1.54 | 4.54 | 3.05 | 3.59 | 1.67 |
| hsa-miR-187 | hsa-miR-187_st1 | 8.73 | 4.74 | 2.75 | 2.74 | 3.75 | 3.18 | 3.32 |
| hsa-miR-34c | hsa-miR-34c_st2 | 8.78 | 1.83 | 2.50 | 3.52 | 3.66 | 3.59 | 3.01 |
| hsa-miR-200c | hsa-miR-200c_st1 | 14.08 | 9.59 | 8.79 | 10.31 | 8.17 | 8.12 | 8.08 |
| hsa-miR-449b | hsa-miR-449b_st1 | 8.03 | 1.83 | 3.24 | 4.46 | 2.48 | 3.55 | 2.80 |
| hsa-asg-4438 | hsa-asg-4438_st2 | 9.40 | 4.53 | 4.50 | 5.04 | 4.53 | 4.11 | 4.49 |
| hsa-asg-924 | hsa-asg-924_st1 | 8.16 | 4.64 | 4.25 | 3.38 | 4.44 | 2.65 | 2.73 |
| hsa-asg-12227 | hsa-asg-12227_st1 | 6.67 | 1.63 | 0.80 | 2.15 | 1.18 | 1.89 | 1.95 |
| hsa-asg-11715 | hsa-asg-11715_st2 | 6.54 | 1.83 | 2.32 | 2.15 | 1.48 | 2.07 | 1.76 |
| hsa-miR-141 | hsa-miR-141_st1 | 8.74 | 5.05 | 3.78 | 4.93 | 4.41 | 4.36 | 2.80 |
| hsa-miR-200a* | hsa-miR-200a-_st2 | 7.21 | 3.05 | 2.83 | 2.15 | 3.89 | 2.57 | 1.76 |
| hsa-miR-605 | hsa-miR-605_st1 | 6.89 | 2.58 | 2.13 | 3.04 | 0.73 | 1.71 | 2.14 |
| hsa-asg-9830 | hsa-asg-9830_st2 | 6.93 | 3.05 | 2.50 | 1.89 | 2.20 | 2.16 | 2.23 |
| hsa-asg-12139 | hsa-asg-12139_st2 | 6.51 | 2.75 | 2.32 | 2.63 | 2.30 | 1.62 | 2.14 |
| hsa-asg-2424 | hsa-asg-2424_st1 | 5.76 | 2.22 | 1.15 | 1.12 | 1.79 | 1.27 | 1.86 |
| hsa-asg-10247 | hsa-asg-10247_st1 | 6.36 | 2.75 | 2.13 | 4.01 | 1.69 | 2.16 | 2.32 |
| hsa-asg-10131 | hsa-asg-10131_st2 | 7.04 | 3.31 | 3.11 | 3.52 | 2.48 | 2.49 | 3.20 |
| hsa-miR-203 | hsa-miR-203_st2 | 10.56 | 7.32 | 5.84 | 7.22 | 8.24 | 6.42 | 5.36 |
| hsa-asg-1296 | hsa-asg-1296_st1 | 6.83 | 3.05 | 2.50 | 4.81 | 2.39 | 2.49 | 2.73 |
| hsa-asg-4219 | hsa-asg-4219_st1 | 6.02 | 3.42 | 1.74 | 1.63 | 1.48 | 2.24 | 1.76 |
| hsa-asg-13705 | hsa-asg-13705_st1 | 5.83 | 1.63 | 0.97 | 3.78 | 2.30 | 2.65 | 2.32 |
| hsa-asg-3822 | hsa-asg-3822_st2 | 6.27 | 2.03 | 2.97 | 3.66 | 2.00 | 2.41 | 2.14 |
| hsa-asg-5119 | hsa-asg-5119_st1 | 6.00 | 2.41 | 2.67 | 1.89 | 1.90 | 1.98 | 2.49 |
| hsa-asg-10080 | hsa-asg-10080_st1 | 5.81 | 2.03 | 1.74 | 2.40 | 1.79 | 2.33 | 2.40 |
| hsa-miR-383 | hsa-miR-383_st1 | 5.93 | 3.31 | 2.83 | 2.40 | 2.57 | 3.18 | 1.30 |
| hsa-miR-495 | hsa-miR-495_st1 | 8.64 | 6.01 | 4.76 | 6.97 | 6.25 | 6.29 | 4.38 |
| hsa-asg-4978 | hsa-asg-4978_st2 | 5.88 | 1.63 | 2.83 | 2.84 | 1.69 | 1.98 | 1.95 |
| hsa-miR-31 | hsa-miR-31_st2 | 12.60 | 10.40 | 9.74 | 8.95 | 10.1 | 8.68 | 8.54 |
| hsa-miR-376a | hsa-asg-10049_st1 | 8.17 | 5.01 | 4.85 | 6.09 | 5.55 | 5.31 | 4.05 |
| hsa-miR-376a | hsa-miR-376a_st2 | 7.46 | 5.13 | 4.03 | 5.49 | 5.66 | 4.82 | 3.97 |
| hsa-miR-376a | hsa-asg-14234_st1 | 6.30 | 3.31 | 4.25 | 3.38 | 3.98 | 4.82 | 3.63 |
| hsa-asg-13254 | hsa-asg-13254_st1 | 8.20 | 5.58 | 5.32 | 6.66 | 5.89 | 5.87 | 3.97 |
| hsa-cand317 | hsa-cand317_st1 | 5.65 | 3.42 | 2.67 | 1.63 | 3.12 | 1.10 | 1.57 |
| hsa-miR-135b | hsa-miR-135b_st2 | 5.81 | 1.43 | 2.67 | 2.40 | 2.82 | 2.33 | 3.08 |
| hsa-miR-140 | hsa-asg-14239_st1 | 9.34 | 7.74 | 6.98 | 6.53 | 7.45 | 6.60 | 5.00 |
| hsa-miR-140 | hsa-miR-140_st2 | 9.14 | 7.72 | 6.11 | 6.37 | 7.21 | 6.60 | 5.45 |
| hsa-asg-13908 | hsa-asg-13908_st2 | 5.86 | 2.03 | 2.50 | 3.66 | 2.48 | 1.44 | 2.80 |
| hsa-asg-8174 | hsa-asg-8174_st1 | 6.39 | 3.31 | 4.03 | 2.84 | 2.98 | 2.86 | 3.20 |
| hsa-miR-539 | hsa-miR-539_st1 | 5.65 | 2.03 | 3.11 | 2.63 | 3.38 | 2.65 | 2.94 |
| hsa-cand852 | hsa-cand852_st2 | 5.81 | 3.05 | 1.94 | 2.84 | 2.98 | 2.24 | 2.65 |
| hsa-asg-280 | hsa-asg-280_st1 | 6.02 | 3.18 | 2.67 | 4.46 | 2.10 | 2.49 | 2.14 |
| hsa-miR-127 | hsa-miR-127_st1 | 9.46 | 6.80 | 5.52 | 7.96 | 7.53 | 7.66 | 5.66 |
| hsa-miR-487b | hsa-miR-487b_st2 | 8.51 | 6.05 | 5.79 | 6.97 | 6.90 | 6.22 | 5.34 |
| hsa-miR-154 | hsa-miR-154_st2 | 6.39 | 3.73 | 2.50 | 4.30 | 4.35 | 4.88 | 3.08 |
| hsa-asg-7464 | hsa-asg-7464_st2 | 6.42 | 4.59 | 3.86 | 4.81 | 2.48 | 3.97 | 2.14 |
| hsa-asg-11160 | hsa-asg-11160_st2 | 6.07 | 2.75 | 3.11 | 3.38 | 3.05 | 2.86 | 2.65 |
| hsa-asg-9980 | hsa-asg-9980_st1 | 6.74 | 5.17 | 4.44 | 4.01 | 1.69 | 3.35 | 2.80 |
| hsa-miR-96 | hsa-miR-96_st1 | 6.09 | 4.97 | 3.36 | 3.04 | 2.98 | 4.07 | 2.80 |
| hsa-miR-410 | hsa-miR-410_st1 | 5.33 | 2.41 | 2.32 | 1.37 | 3.71 | 2.49 | 2.80 |
| hsa-asg-11361 | hsa-asg-11361_st2 | 6.13 | 2.75 | 3.48 | 3.38 | 3.25 | 3.59 | 3.32 |
| hsa-cand26 | hsa-cand26_st2 | 7.67 | 6.11 | 5.56 | 6.04 | 4.06 | 3.64 | 4.70 |
| hsa-asg-1596 | hsa-asg-1596_st2 | 6.78 | 4.41 | 5.06 | 4.01 | 3.19 | 4.36 | 4.12 |
| hsa-asg-3251 | hsa-asg-3251_st1 | 6.09 | 4.22 | 4.11 | 4.01 | 2.82 | 3.50 | 3.89 |
| hsa-miR-134 | hsa-miR-134_st2 | 7.70 | 5.09 | 5.73 | 6.00 | 5.84 | 5.67 | 4.15 |
| hsa-miR-34b | hsa-miR-34b_st2 | 7.92 | 4.74 | 5.06 | 6.41 | 6.23 | 5.02 | 5.18 |
| hsa-miR-329 | hsa-asg-13589_st2 | 5.65 | 1.63 | 3.11 | 3.78 | 3.71 | 4.38 | 2.32 |
| hsa-miR-329 | hsa-miR-329_st1 | 5.73 | 3.73 | 2.97 | 4.61 | 3.25 | 4.54 | 2.80 |
| hsa-miR-329 | hsa-asg-13204_st2 | 5.78 | 4.07 | 2.83 | 4.21 | 3.38 | 4.20 | 3.43 |
| hsa-asg-13135 | hsa-asg-13135_st1 | 7.56 | 5.61 | 5.61 | 5.24 | 4.89 | 4.76 | 4.70 |
| hsa-miR-183 | hsa-miR-183_st1 | 9.37 | 7.65 | 6.71 | 6.71 | 7.93 | 7.54 | 5.78 |
| hsa-asg-10881 | hsa-asg-10881_st1 | 7.57 | 5.71 | 4.98 | 6.06 | 5.43 | 4.76 | 5.40 |
| hsa-asg-13166 | hsa-asg-13166_st2 | 6.30 | 4.47 | 3.36 | 4.87 | 4.94 | 4.07 | 4.12 |
| hsa-miR-369-5p | hsa-miR-369-5p_st2 | 5.73 | 3.53 | 2.67 | 4.46 | 4.35 | 4.33 | 2.49 |
| hsa-asg-548 | hsa-asg-548_st1 | 5.33 | 3.05 | 1.94 | 3.52 | 3.50 | 2.79 | 1.95 |
| hsa-asg-7471 | hsa-asg-7471_st1 | 7.89 | 5.58 | 5.67 | 5.68 | 6.74 | 5.67 | 5.25 |
| hsa-miR-485-3p | hsa-miR-485-3p_st2 | 5.93 | 3.64 | 2.97 | 4.30 | 4.41 | 4.24 | 3.08 |
| hsa-miR-379 | hsa-miR-379_st1 | 8.66 | 6.51 | 6.37 | 7.12 | 6.96 | 7.01 | 6.54 |
| hsa-miR-142-5p | hsa-miR-142-5p_st2 | 8.12 | 6.41 | 6.67 | 6.06 | 6.22 | 5.77 | 6.60 |
| hsa-asg-13997 | hsa-asg-13997_st2 | 4.42 | 3.05 | 3.24 | 2.15 | 2.98 | 2.16 | 2.32 |
| hsa-miR-182 | hsa-miR-182_st1 | 11.13 | 10.22 | 9.98 | 8.86 | 9.82 | 9.35 | 9.50 |
| hsa-miR-132 | hsa-miR-132_st1 | 10.15 | 9.71 | 8.51 | 8.34 | 8.34 | 8.56 | 8.02 |
| hsa-asg-3711 | hsa-asg-3711_st2 | 6.99 | 5.69 | 6.12 | 5.12 | 5.52 | 5.11 | 5.20 |
| hsa-asg-9411 | hsa-asg-9411_st1 | 6.90 | 5.66 | 4.61 | 5.33 | 5.36 | 5.05 | 4.83 |
| hsa-asg-10830 | hsa-asg-10830_st2 | 5.70 | 4.35 | 3.95 | 3.66 | 3.89 | 3.89 | 4.43 |
| hsa-asg-14048 | hsa-asg-14048_st1 | 6.07 | 4.41 | 4.90 | 3.52 | 3.60 | 5.00 | 3.20 |
| hsa-asg-4513 | hsa-asg-4513_st2 | 5.53 | 3.18 | 4.44 | 4.30 | 2.98 | 3.40 | 4.12 |
| hsa-miR-494 | hsa-miR-494_st1 | 8.41 | 6.39 | 7.25 | 7.23 | 6.95 | 6.60 | 7.61 |
| hsa-miR-494 | hsa-miR61_st2 | 7.88 | 6.81 | 6.50 | 6.86 | 6.42 | 6.35 | 7.05 |
| hsa-asg-3614 | hsa-asg-3614_st1 | 6.19 | 4.79 | 5.36 | 3.59 | 4.38 | 4.00 | 5.11 |
| hsa-asg-13298 | hsa-asg-13298_st1 | 7.24 | 5.17 | 6.20 | 4.87 | 5.96 | 5.40 | 6.18 |
| hsa-asg-9706 | hsa-asg-9706_st1 | 6.78 | 4.97 | 4.66 | 5.90 | 5.31 | 5.89 | 5.90 |
| hsa-asg-8266 | hsa-asg-8266_st2 | 5.76 | 4.15 | 3.78 | 4.61 | 5.22 | 4.41 | 4.70 |
| hsa-asg-3046 | hsa-asg-3046_st2 | 7.08 | 5.13 | 6.50 | 4.93 | 5.84 | 5.09 | 6.22 |
| hsa-asg-917 | hsa-asg-917_st2 | 6.58 | 5.69 | 5.25 | 4.61 | 4.89 | 5.89 | 4.79 |
| hsa-asg-3224 | hsa-asg-3224_st1 | 5.56 | 4.79 | 3.78 | 4.46 | 4.48 | 4.38 | 4.32 |
| hsa-miR-510 | hsa-miR-510_st2 | 6.07 | 5.27 | 5.02 | 4.75 | 4.65 | 4.71 | 5.04 |
| hsa-asg-10065 | hsa-asg-10065_st1 | 5.36 | 4.47 | 4.31 | 3.66 | 4.70 | 4.44 | 3.63 |
| hsa-asg-9575 | hsa-asg-9575_st1 | 5.73 | 4.53 | 4.38 | 4.11 | 4.89 | 4.33 | 4.96 |
| hsa-asg-1939 | hsa-asg-1939_st1 | 4.60 | 3.73 | 3.36 | 3.52 | 3.12 | 3.18 | 2.94 |
| hsa-asg-5385 | hsa-asg-5385_st2 | 6.90 | 5.79 | 6.49 | 5.59 | 5.50 | 5.73 | 6.35 |
| hsa-asg-14233 | hsa-asg-14233_st1 | 10.32 | 9.44 | 9.21 | 9.23 | 10.1 | 9.41 | 8.84 |
| hsa-asg-8485 | hsa-asg-8485_st1 | 5.83 | 4.47 | 4.90 | 4.99 | 5.20 | 4.80 | 4.19 |

| | LNneg | | | | | | | | |
|---|---|---|---|---|---|---|---|---|---|
| MicroRNA | 7 | 8 | 9 | M | SD | % | ttest | log2Diff | Fold |
| hsa-miR-375 | 1.00 | 4.61 | 6.37 | 4.27 | 1.82 | 0 | 2.19E−03 | −8.51 | 363 |
| hsa-miR-205 | 3.38 | 5.30 | 7.74 | 4.71 | 1.85 | 33 | 2.64E−03 | −8.36 | 329 |
| hsa-miR-429 | 2.31 | 2.41 | 5.36 | 2.86 | 1.14 | 0 | 2.60E−04 | −7.44 | 174 |
| hsa-asg-13231 | 1.78 | 2.05 | 4.44 | 3.47 | 1.01 | 0 | 1.95E−04 | −6.91 | 120 |
| hsa-asg-14153 | 1.17 | 2.74 | 4.37 | 2.73 | 0.85 | 0 | 6.18E−05 | −6.84 | 114 |
| hsa-asg-4439 | 2.77 | 3.71 | 4.04 | 3.31 | 0.84 | 0 | 7.60E−05 | −6.56 | 94.1 |
| hsa-miR-200a | 4.05 | 4.75 | 7.76 | 5.54 | 1.15 | 67 | 6.81E−04 | −6.48 | 89.4 |
| hsa-miR-200b | 6.50 | 7.64 | 10.41 | 7.68 | 1.27 | 100 | 2.13E−03 | −5.96 | 62.1 |
| hsa-asg-9269 | 2.62 | 2.23 | 3.94 | 2.96 | 0.80 | 0 | 1.12E−04 | −5.94 | 61.4 |
| hsa-asg-7637 | 3.27 | 3.61 | 5.24 | 3.78 | 0.77 | 0 | 8.82E−05 | −5.87 | 58.5 |
| hsa-cand150 | 2.62 | 3.97 | 4.44 | 3.60 | 1.21 | 11 | 1.81E−03 | −5.86 | 58.2 |
| hsa-miR-449 | 0.93 | 1.66 | 4.70 | 2.70 | 1.37 | 0 | 4.29E−03 | −5.68 | 51.3 |
| hsa-miR-187 | 3.03 | 3.35 | 3.14 | 3.33 | 0.61 | 0 | 3.20E−05 | −5.40 | 42.2 |
| hsa-miR-34c | 3.48 | 3.71 | 6.83 | 3.57 | 1.38 | 11 | 7.09E−03 | −5.21 | 37.1 |
| hsa-miR-200c | 7.96 | 8.87 | 11.51 | 9.05 | 1.21 | 100 | 4.35E−03 | −5.03 | 32.7 |
| hsa-miR-449b | 2.77 | 3.17 | 4.29 | 3.18 | 0.84 | 0 | 5.86E−04 | −4.85 | 28.9 |
| hsa-asg-4438 | 4.18 | 4.80 | 5.32 | 4.61 | 0.39 | 0 | 2.56E−06 | −4.79 | 27.7 |
| hsa-asg-924 | 2.14 | 2.74 | 3.50 | 3.38 | 0.89 | 0 | 9.71E−04 | −4.78 | 27.4 |
| hsa-asg-12227 | 2.77 | 2.58 | 2.71 | 1.96 | 0.68 | 0 | 1.75E−04 | −4.71 | 26.1 |
| hsa-asg-11715 | 0.63 | 1.46 | 3.36 | 1.90 | 0.74 | 0 | 3.47E−04 | −4.64 | 24.9 |
| hsa-miR-141 | 3.83 | 3.80 | 4.51 | 4.16 | 0.69 | 0 | 2.42E−04 | −4.58 | 23.8 |
| hsa-miR-200a* | 2.14 | 3.17 | 2.89 | 2.72 | 0.64 | 0 | 1.67E−04 | −4.49 | 22.5 |
| hsa-miR-605 | 2.90 | 3.03 | 4.44 | 2.52 | 1.03 | 0 | 3.86E−03 | −4.37 | 20.7 |
| hsa-asg-9830 | 3.48 | 2.23 | 4.21 | 2.66 | 0.76 | 0 | 7.30E−04 | −4.27 | 19.3 |
| hsa-asg-12139 | 1.60 | 2.05 | 3.50 | 2.32 | 0.59 | 0 | 1.47E−04 | −4.18 | 18.2 |
| hsa-asg-2424 | 2.62 | 1.66 | 2.89 | 1.84 | 0.63 | 0 | 3.83E−04 | −3.91 | 15.1 |
| hsa-asg-10247 | 0.37 | 3.17 | 3.94 | 2.50 | 1.14 | 0 | 1.23E−02 | −3.85 | 14.4 |
| hsa-asg-10131 | 2.62 | 3.17 | 5.07 | 3.22 | 0.79 | 0 | 1.75E−03 | −3.82 | 14.1 |
| hsa-miR-203 | 5.17 | 6.05 | 9.34 | 6.77 | 1.38 | 78 | 3.19E−02 | −3.78 | 13.8 |
| hsa-asg-1296 | 3.15 | 3.88 | 4.13 | 3.24 | 0.85 | 0 | 3.94E−03 | −3.59 | 12.1 |
| hsa-asg-4219 | 2.90 | 2.74 | 3.94 | 2.43 | 0.87 | 0 | 4.53E−03 | −3.59 | 12.1 |
| hsa-asg-13705 | 0.37 | 3.17 | 3.22 | 2.27 | 1.11 | 0 | 1.58E−02 | −3.57 | 11.8 |
| hsa-asg-3822 | 1.60 | 2.89 | 4.76 | 2.72 | 0.99 | 0 | 9.30E−03 | −3.55 | 11.7 |
| hsa-asg-5119 | 2.90 | 2.58 | 3.62 | 2.49 | 0.55 | 0 | 3.24E−04 | −3.51 | 11.4 |
| hsa-asg-10080 | 2.47 | 2.23 | 3.36 | 2.31 | 0.48 | 0 | 1.19E−04 | −3.50 | 11.3 |
| hsa-miR-383 | 2.62 | 2.58 | 1.36 | 2.46 | 0.71 | 0 | 1.61E−03 | −3.47 | 11.1 |
| hsa-miR-495 | 5.14 | 2.41 | 4.87 | 5.23 | 1.36 | 56 | 4.46E−02 | −3.41 | 10.7 |
| hsa-asg-4978 | 2.77 | 2.58 | 4.13 | 2.49 | 0.79 | 0 | 3.44E−03 | −3.39 | 10.5 |
| hsa-miR-31 | 7.71 | 8.66 | 10.09 | 9.21 | 0.92 | 100 | 8.02E−03 | −3.38 | 10.4 |
| hsa-miR-376a | 3.83 | 4.12 | 4.64 | 4.83 | 0.75 | 11 | 2.93E−03 | −3.34 | 10.2 |
| hsa-miR-376a | 2.47 | 3.80 | 3.73 | 4.34 | 1.02 | 0 | 1.98E−02 | −3.12 | 8.7 |
| hsa-miR-376a | 2.90 | 4.04 | 1.83 | 3.57 | 0.86 | 0 | 1.72E−02 | −2.73 | 6.6 |
| hsa-asg-13254 | 4.71 | 2.41 | 3.36 | 4.86 | 1.37 | 56 | 5.00E−02 | −3.34 | 10.1 |
| hsa-cand317 | 3.75 | 1.85 | 2.51 | 2.40 | 0.92 | 0 | 1.01E−02 | −3.24 | 9.5 |
| hsa-miR-135b | 3.27 | 2.23 | 2.89 | 2.57 | 0.55 | 0 | 5.23E−04 | −3.24 | 9.4 |
| hsa-miR-140 | 5.69 | 3.80 | 5.20 | 6.11 | 1.28 | 67 | 4.40E−02 | −3.23 | 9.4 |
| hsa-miR-140 | 4.76 | 4.75 | 5.24 | 6.02 | 1.05 | 44 | 2.32E−02 | −3.11 | 8.6 |
| hsa-asg-13908 | 2.62 | 2.41 | 3.73 | 2.63 | 0.72 | 0 | 2.84E−03 | −3.23 | 9.4 |
| hsa-asg-8174 | 2.77 | 2.74 | 4.13 | 3.21 | 0.53 | 0 | 4.53E−04 | −3.18 | 9.1 |
| hsa-miR-539 | 1.96 | 2.58 | 1.36 | 2.52 | 0.63 | 0 | 1.55E−03 | −3.13 | 8.7 |
| hsa-cand852 | 2.90 | 2.05 | 3.50 | 2.68 | 0.51 | 0 | 4.20E−04 | −3.13 | 8.7 |
| hsa-asg-280 | 1.78 | 3.40 | 4.51 | 2.97 | 1.00 | 0 | 2.01E−02 | −3.05 | 8.3 |
| hsa-miR-127 | 6.57 | 5.47 | 5.42 | 6.51 | 1.03 | 56 | 2.66E−02 | −2.95 | 7.7 |
| hsa-miR-487b | 4.88 | 3.71 | 4.37 | 5.58 | 1.11 | 67 | 3.69E−02 | −2.93 | 7.6 |
| hsa-miR-154 | 3.15 | 1.28 | 3.94 | 3.47 | 1.10 | 0 | 3.63E−02 | −2.92 | 7.6 |
| hsa-asg-7464 | 3.66 | 2.23 | 3.84 | 3.51 | 0.99 | 0 | 2.37E−02 | −2.91 | 7.5 |
| hsa-asg-11160 | 2.47 | 3.51 | 5.11 | 3.21 | 0.79 | 0 | 8.90E−03 | −2.86 | 7.2 |
| hsa-asg-9980 | 3.83 | 5.05 | 4.64 | 3.89 | 1.13 | 11 | 4.33E−02 | −2.85 | 7.2 |
| hsa-miR-96 | 3.03 | 1.85 | 3.06 | 3.24 | 0.87 | 11 | 1.43E−02 | −2.85 | 7.2 |
| hsa-miR-410 | 3.15 | 1.85 | 2.51 | 2.51 | 0.68 | 0 | 4.44E−03 | −2.81 | 7.0 |
| hsa-asg-11361 | 3.83 | 2.58 | 4.29 | 3.39 | 0.52 | 0 | 1.02E−03 | −2.74 | 6.7 |
| hsa-cand26 | 5.27 | 4.04 | 5.44 | 4.98 | 0.91 | 22 | 2.32E−02 | −2.69 | 6.4 |
| hsa-asg-1596 | 4.12 | 4.19 | 4.37 | 4.20 | 0.49 | 0 | 1.06E−03 | −2.58 | 6.0 |
| hsa-asg-3251 | 2.90 | 3.03 | 3.22 | 3.52 | 0.55 | 0 | 2.17E−03 | −2.56 | 5.9 |
| hsa-miR-134 | 4.71 | 4.29 | 5.00 | 5.16 | 0.68 | 0 | 7.87E−03 | −2.54 | 5.8 |
| hsa-miR-34b | 4.71 | 5.09 | 6.38 | 5.43 | 0.71 | 56 | 1.01E−02 | −2.50 | 5.6 |
| hsa-miR-329 | 3.66 | 2.74 | 3.06 | 3.16 | 0.84 | 0 | 2.31E−02 | −2.49 | 5.6 |
| hsa-miR-329 | 2.77 | 3.29 | 2.71 | 3.41 | 0.74 | 0 | 1.74E−02 | −2.32 | 5.0 |
| hsa-miR-329 | 3.98 | 2.58 | 3.50 | 3.58 | 0.59 | 0 | 7.78E−03 | −2.21 | 4.6 |
| hsa-asg-13135 | 5.14 | 4.44 | 5.57 | 5.11 | 0.44 | 22 | 7.06E−04 | −2.45 | 5.5 |
| hsa-miR-183 | 7.50 | 6.30 | 6.63 | 6.97 | 0.72 | 89 | 1.29E−02 | −2.40 | 5.3 |
| hsa-asg-10881 | 4.18 | 5.01 | 5.20 | 5.19 | 0.55 | 22 | 3.45E−03 | −2.37 | 5.2 |
| hsa-asg-13166 | 3.57 | 2.05 | 4.04 | 3.94 | 0.88 | 0 | 3.54E−02 | −2.36 | 5.1 |
| hsa-miR-369-5p | 2.90 | 2.58 | 3.50 | 3.42 | 0.81 | 0 | 2.64E−02 | −2.31 | 4.9 |
| hsa-asg-548 | 3.38 | 2.74 | 4.58 | 3.05 | 0.83 | 0 | 3.09E−02 | −2.28 | 4.8 |
| hsa-asg-7471 | 5.24 | 4.97 | 6.07 | 5.65 | 0.52 | 56 | 3.52E−03 | −2.23 | 4.7 |
| hsa-miR-485-3p | 3.66 | 3.51 | 3.84 | 3.74 | 0.51 | 0 | 3.70E−03 | −2.19 | 4.6 |
| hsa-miR-379 | 6.33 | 6.13 | 6.20 | 6.58 | 0.37 | 100 | 6.65E−04 | −2.09 | 4.2 |
| hsa-miR-142-5p | 5.57 | 5.75 | 5.51 | 6.06 | 0.44 | 100 | 2.17E−03 | −2.05 | 4.2 |
| hsa-asg-13997 | 1.25 | 3.17 | 2.29 | 2.51 | 0.65 | 0 | 2.39E−02 | −1.91 | 3.8 |
| hsa-miR-182 | 8.97 | 8.56 | 8.11 | 9.26 | 0.70 | 100 | 3.43E−02 | −1.87 | 3.7 |
| hsa-miR-132 | 8.00 | 8.42 | 6.86 | 8.31 | 0.74 | 89 | 4.50E−02 | −1.85 | 3.6 |
| hsa-asg-3711 | 4.52 | 4.41 | 4.84 | 5.17 | 0.55 | 0 | 1.37E−02 | −1.82 | 3.5 |
| hsa-asg-9411 | 5.03 | 4.71 | 5.24 | 5.09 | 0.34 | 11 | 1.00E−03 | −1.81 | 3.5 |
| hsa-asg-10830 | 3.38 | 3.61 | 3.84 | 3.89 | 0.34 | 0 | 9.37E−04 | −1.81 | 3.5 |
| hsa-asg-14048 | 4.57 | 5.13 | 4.04 | 4.26 | 0.70 | 0 | 4.14E−02 | −1.80 | 3.5 |
| hsa-asg-4513 | 4.12 | 3.40 | 3.73 | 3.74 | 0.53 | 0 | 1.22E−02 | −1.78 | 3.4 |
| hsa-miR-494 | 5.71 | 5.84 | 6.58 | 6.68 | 0.64 | 100 | 3.41E−02 | −1.73 | 3.3 |
| hsa-miR-494 | 5.38 | 5.77 | 6.87 | 6.45 | 0.55 | 89 | 3.91E−02 | −1.43 | 2.7 |
| hsa-asg-3614 | 3.83 | 4.73 | 4.61 | 4.49 | 0.59 | 0 | 2.61E−02 | −1.70 | 3.2 |
| hsa-asg-13298 | 6.00 | 5.48 | 6.20 | 5.72 | 0.50 | 44 | 2.06E−02 | −1.52 | 2.9 |
| hsa-asg-9706 | 4.52 | 5.20 | 5.07 | 5.27 | 0.53 | 11 | 2.68E−02 | −1.51 | 2.8 |
| hsa-asg-8266 | 4.47 | 3.40 | 3.84 | 4.29 | 0.55 | 0 | 3.60E−02 | −1.47 | 2.8 |
| hsa-asg-3046 | 5.64 | 5.36 | 5.84 | 5.62 | 0.54 | 78 | 3.15E−02 | −1.47 | 2.8 |
| hsa-asg-917 | 5.00 | 4.85 | 5.20 | 5.13 | 0.43 | 33 | 1.19E−02 | −1.45 | 2.7 |
| hsa-asg-3224 | 3.48 | 3.61 | 4.29 | 4.18 | 0.45 | 0 | 1.88E−02 | −1.38 | 2.6 |
| hsa-miR-510 | 4.52 | 4.25 | 5.07 | 4.81 | 0.32 | 11 | 5.64E−03 | −1.26 | 2.4 |
| hsa-asg-10065 | 4.05 | 3.80 | 3.94 | 4.11 | 0.39 | 0 | 1.53E−02 | −1.25 | 2.4 |
| hsa-asg-9575 | 4.71 | 4.12 | 4.37 | 4.49 | 0.31 | 0 | 5.32E−03 | −1.24 | 2.4 |
| hsa-asg-1939 | 3.38 | 3.51 | 3.73 | 3.39 | 0.27 | 11 | 2.73E−03 | −1.22 | 2.3 |
| hsa-asg-5385 | 5.20 | 5.66 | 5.86 | 5.80 | 0.40 | 33 | 3.08E−02 | −1.11 | 2.2 |
| hsa-asg-14233 | 9.03 | 8.85 | 8.87 | 9.23 | 0.41 | 100 | 3.75E−02 | −1.09 | 2.1 |
| hsa-asg-8485 | 4.57 | 5.13 | 4.87 | 4.79 | 0.33 | 0 | 1.62E−02 | −1.04 | 2.1 |

SD, standard deviation;
%, percentage of samples expressing miRNA above background levels;
Log2Diff, difference in VSN-transformed expression bewteen TRA and LNneg samples.

### Example 37

### miRNAs Differentally Expressed Between Normal Small Intestine Tissue and Normal Lymph Nodes

[0349] To identify miRNAs that may be useful markers for metastasis of cancerous small intestine cells to lymph nodes, the inventors identified miRNAs that are expressed at significantly higher levels in normal small intestine tissue than in cancer-negative lymph nodes.

[0350] Total RNA, purified from one normal human small intestine sample (FirstChoice® Human Small Intestine Total RNA, cat. no. AM7984; Ambion, Austin, Tex., USA) and from nine normal human lymph node samples (FirstChoice® Human Lymph Node Total RNA, cat. no. AM7894; Ambion, Austin, Tex., USA) was purchased from Ambion. miRNA purification and labeling and microarray expression analyses were performed as described above in Example 2.

[0351] The inventors identified 413 miRNAs (28 verified, 385 predicted) with significant differential expression between the normal small intestine and normal lymph node samples (|log 2-Diff| small intestine vs LN neg≧1 and p-value<0.05) (Table 36) Among the verified miRNAs, hsa-miR-429 and -375 were expressed at levels between 85- and 100-fold higher in the small intestine sample; 4 miRNAs (hsa-miR-215, -200a, -187, and -200b) were expressed at levels between 25- and 50-fold higher in small intestine; 5 miRNAs (hsa-miR-141, -200c, -605, -194, and -802) were expressed at levels between 10- and 20-fold higher in small intestine; and 5 miRNAs were expressed at levels between 5- and 10-fold higher in the small intestine sample than in normal lymph nodes. Among the predicted miRNAs, 6 miRNA (hsa-asg-9939_st2, -7846_st1, -6880 st1, -14182_st1, -6838 st1, and -924 st1) were expressed at levels between 25- and 40-fold higher in the small intestine sample; 13 miRNAs were expressed at levels between 10- and 20-fold higher in small intestine; and 56 miRNAs were expressed at levels between 5- and 10-fold higher in the small intestine sample than in normal lymph nodes.

TABLE 36
MicroRNAs Differentially Expressed Between Normal Small Intestine Samples (SI) and
Cancer-Negative Lymph Node Samples (LNneg) from Patients.

| | Probe | | LNneg | | | | | | |
|---|---|---|---|---|---|---|---|---|---|
| MicroRNA | ID | SI | 1 | 2 | 3 | | 5 | 6 | 7 |
| hsa-miR-429 | hsa-miR-429_st1 | 9.49 | 3.42 | 1.54 | 3.66 | 2.10 | 2.33 | 2.65 | 2.31 |
| hsa-miR-375 | hsa-miR-375_st1 | 10.70 | 5.95 | 4.88 | 6.24 | 2.82 | 2.93 | 3.63 | 1.00 |
| hsa-miR-215 | hsa-miR-215_st1 | 11.33 | 6.95 | 5.77 | 5.71 | 6.66 | 5.51 | 4.79 | 5.49 |
| hsa-asg-9939 | hsa-asg-9939_st2 | 7.85 | 2.22 | 2.32 | 2.84 | 2.30 | 2.24 | 3.72 | 1.09 |
| hsa-asg-7846 | hsa-asg-7846_st1 | 7.98 | 4.07 | 2.41 | 1.76 | 2.57 | 2.93 | 1.39 | 2.90 |
| hsa-asg-6880 | hsa-asg-6880_st1 | 11.08 | 5.50 | 6.43 | 5.64 | 5.81 | 5.80 | 5.77 | 5.45 |
| hsa-miR-200a | hsa-miR-200a_st2 | 10.52 | 6.26 | 5.02 | 6.49 | 5.71 | 5.25 | 4.54 | 4.05 |
| hsa-miR-187 | hsa-miR-187_st1 | 8.30 | 4.74 | 2.75 | 2.74 | 3.75 | 3.18 | 3.32 | 3.03 |
| hsa-asg-14182 | hsa-asg-14182_st1 | 6.78 | 2.41 | 0.97 | 1.89 | 1.79 | 2.57 | 1.76 | 2.77 |
| hsa-miR-200b | hsa-miR-200b_st1 | 12.57 | 7.61 | 7.75 | 8.91 | 6.69 | 6.79 | 6.82 | 6.50 |
| hsa-asg-6838 | hsa-asg-6838_st1 | 11.03 | 5.81 | 6.21 | 5.69 | 6.12 | 6.49 | 6.23 | 5.69 |
| hsa-asg-924 | hsa-asg-924_st1 | 8.03 | 4.64 | 4.25 | 3.38 | 4.44 | 2.65 | 2.73 | 2.14 |
| hsa-miR-141 | hsa-miR-141_st1 | 8.47 | 5.05 | 3.78 | 4.93 | 4.41 | 4.36 | 2.80 | 3.83 |
| hsa-asg-13498 | hsa-asg-13498_st1 | 7.65 | 3.91 | 4.58 | 1.76 | 1.28 | 5.42 | 5.30 | 1.25 |
| hsa-asg-8330 | hsa-asg-8330_st2 | 8.93 | 3.18 | 5.50 | 4.46 | 4.78 | 4.88 | 5.49 | 3.83 |
| hsa-miR206 | hsa-miR206_st1 | 8.57 | 3.42 | 5.53 | 2.84 | 4.48 | 3.97 | 5.67 | 3.83 |
| hsa-miR-200c | hsa-miR-200c_st1 | 13.09 | 9.59 | 8.79 | 10.31 | 8.17 | 8.12 | 8.08 | 7.96 |
| hsa-asg-7637 | hsa-asg-7637_st2 | 7.73 | 3.64 | 2.50 | 4.46 | 3.44 | 3.89 | 3.97 | 3.27 |
| hsa-asg-12552 | hsa-asg-12552_st1 | 8.11 | 4.07 | 3.78 | 3.52 | 4.44 | 3.40 | 4.15 | 3.83 |
| hsa-cand317 | hsa-cand317_st1 | 6.23 | 3.42 | 2.67 | 1.63 | 3.12 | 1.10 | 1.57 | 3.75 |
| hsa-asg-11715 | hsa-asg-11715_st2 | 5.50 | 1.83 | 2.32 | 2.15 | 1.48 | 2.07 | 1.76 | 0.63 |
| hsa-asg-6377 | hsa-asg-6377_st2 | 6.24 | 2.22 | 2.83 | 3.66 | 1.90 | 1.71 | 3.43 | 2.77 |
| hsa-asg-3595 | hsa-asg-3595_st1 | 6.82 | 2.58 | 3.78 | 2.15 | 2.66 | 1.71 | 4.12 | 3.27 |
| hsa-miR-605 | hsa-miR-605_st1 | 6.07 | 2.58 | 2.13 | 3.04 | 0.73 | 1.71 | 2.14 | 2.90 |
| hsa-asg-9262 | hsa-asg-9262_st1 | 7.94 | 4.59 | 4.28 | 3.96 | 5.74 | 4.71 | 4.52 | 3.75 |
| hsa-asg-11612 | hsa-asg-11612_st1 | 8.52 | 5.17 | 4.96 | 4.71 | 5.67 | 4.54 | 4.65 | 4.62 |
| hsa-miR-194 | hsa-miR-194_st2 | 12.34 | 9.82 | 9.32 | 8.92 | 9.34 | 8.92 | 8.29 | 8.54 |
| hsa-miR-802 | hsa-miR140_st1 | 5.08 | 1.24 | 2.32 | 1.37 | 1.48 | 1.80 | 1.76 | 0.78 |
| hsa-miR-802 | hsa-asg-353_st1 | 5.15 | 2.41 | 2.97 | 2.63 | 2.48 | 2.49 | 0.87 | 0.63 |
| hsa-asg-6027 | hsa-asg-6027_st2 | 12.10 | 7.74 | 8.47 | 8.57 | 8.01 | 9.01 | 8.09 | 8.52 |
| hsa-asg-4691 | hsa-asg-4691_st1 | 9.24 | 5.81 | 6.57 | 5.69 | 5.43 | 5.74 | 6.28 | 5.03 |
| hsa-miR-31 | hsa-miR-31_st2 | 12.52 | 10.40 | 9.74 | 8.95 | 10.15 | 8.68 | 8.54 | 7.71 |
| hsa-asg-3667 | hsa-asg-3667_st2 | 5.97 | 2.03 | 2.83 | 2.84 | 2.00 | 2.93 | 2.57 | 2.31 |
| hsa-asg-12983 | hsa-asg-12983_st2 | 5.82 | 1.83 | 3.24 | 1.89 | 2.20 | 2.93 | 3.68 | 0.63 |
| hsa-asg-3046 | hsa-asg-3046_st2 | 8.87 | 5.13 | 6.50 | 4.93 | 5.84 | 5.09 | 6.22 | 5.64 |
| hsa-asg-9082 | hsa-asg-9082_st1 | 6.21 | 2.75 | 4.47 | 1.24 | 2.90 | 3.06 | 3.63 | 2.47 |
| hsa-cand601 | hsa-cand601_st2 | 6.20 | 3.31 | 4.38 | 1.89 | 1.48 | 2.86 | 3.43 | 3.15 |
| hsa-asg-13298 | hsa-asg-13298_st1 | 8.91 | 5.17 | 6.20 | 4.87 | 5.96 | 5.40 | 6.18 | 6.00 |
| hsa-miR-200a* | hsa-miR-200a-_st2 | 5.88 | 3.05 | 2.83 | 2.15 | 3.89 | 2.57 | 1.76 | 2.14 |
| hsa-asg-2154 | hsa-asg-2154_st1 | 5.38 | 1.43 | 2.97 | 1.63 | 1.59 | 2.49 | 2.87 | 0.63 |
| hsa-asg-12799 | hsa-asg-12799_st1 | 7.19 | 3.53 | 5.30 | 3.30 | 2.90 | 4.20 | 5.40 | 3.91 |
| hsa-asg-13705 | hsa-asg-13705_st1 | 5.24 | 1.63 | 0.97 | 3.78 | 2.30 | 2.65 | 2.32 | 0.37 |
| hsa-asg-11160 | hsa-asg-11160_st2 | 6.16 | 2.75 | 3.11 | 3.38 | 3.05 | 2.86 | 2.65 | 2.47 |
| hsa-asg-12058 | hsa-asg-12058_st1 | 5.27 | 1.83 | 1.74 | 2.84 | 2.00 | 2.99 | 3.43 | 1.09 |
| hsa-asg-10481 | hsa-asg-10481_st1 | 6.16 | 2.41 | 3.95 | 3.66 | 2.90 | 2.24 | 3.32 | 3.98 |
| hsa-miR-192 | hsa-miR-192_st2 | 12.49 | 10.83 | 9.82 | 10.13 | 10.00 | 9.55 | 8.66 | 9.31 |
| hsa-asg-11410 | hsa-asg-11410_st1 | 5.37 | 2.90 | 3.68 | 2.84 | 3.19 | 2.24 | 1.21 | 1.60 |
| hsa-asg-11320 | hsa-asg-11320_st2 | 7.03 | 4.88 | 4.44 | 4.11 | 4.10 | 4.36 | 4.05 | 3.83 |
| hsa-asg-10131 | hsa-asg-10131_st2 | 6.04 | 3.31 | 3.11 | 3.52 | 2.48 | 2.49 | 3.20 | 2.62 |
| hsa-asg-12139 | hsa-asg-12139_st2 | 5.12 | 2.75 | 2.32 | 2.63 | 2.30 | 1.62 | 2.14 | 1.60 |
| hsa-asg-11926 | hsa-asg-11926_st1 | 5.34 | 1.83 | 3.24 | 1.63 | 1.90 | 2.41 | 3.08 | 1.42 |
| hsa-asg-13030 | hsa-asg-13030_st1 | 7.06 | 4.07 | 4.94 | 3.78 | 4.28 | 4.41 | 4.54 | 3.48 |
| hsa-asg-5986 | hsa-asg-5986_st1 | 9.89 | 6.99 | 7.15 | 6.21 | 7.52 | 6.14 | 6.77 | 8.00 |
| hsa-cand899 | hsa-cand899_st2 | 6.75 | 2.75 | 4.74 | 3.30 | 3.98 | 4.17 | 4.77 | 3.38 |
| hsa-asg-5119 | hsa-asg-5119_st1 | 5.19 | 2.41 | 2.67 | 1.89 | 1.90 | 1.98 | 2.49 | 2.90 |
| hsa-asg-7095 | hsa-asg-7095_st1 | 8.17 | 4.88 | 5.49 | 5.17 | 5.15 | 5.03 | 5.39 | 5.84 |
| hsa-asg-4219 | hsa-asg-4219_st1 | 5.10 | 3.42 | 1.74 | 1.63 | 1.48 | 2.24 | 1.76 | 2.90 |
| hsa-asg-4066 | hsa-asg-4066_st2 | 6.29 | 2.75 | 5.02 | 2.15 | 3.55 | 3.35 | 2.80 | 4.05 |
| hsa-miR-9 | hsa-cand90_st2 | 5.44 | 3.53 | 3.11 | 2.63 | 2.98 | 2.79 | 2.14 | 2.62 |
| hsa-miR-9 | hsa-miR-9_st2 | 5.89 | 3.42 | 3.48 | 2.84 | 3.25 | 3.59 | 2.14 | 3.48 |
| hsa-asg-8239 | hsa-asg-8239_st1 | 5.86 | 3.18 | 3.95 | 1.89 | 2.82 | 3.73 | 3.20 | 2.77 |
| hsa-asg-10411 | hsa-asg-10411_st1 | 5.84 | 2.41 | 2.67 | 4.21 | 3.55 | 2.57 | 4.49 | 3.15 |
| hsa-asg-4015 | hsa-asg-4015_st2 | 7.83 | 5.37 | 6.12 | 5.07 | 5.98 | 4.76 | 5.64 | 3.03 |
| hsa-asg-3036 | hsa-asg-3036_st1 | 6.27 | 3.18 | 3.73 | 5.12 | 3.05 | 2.65 | 2.49 | 3.27 |
| hsa-asg-1260 | hsa-asg-1260_st1 | 5.20 | 2.41 | 2.83 | 2.40 | 3.19 | 2.57 | 3.08 | 2.90 |
| hsa-asg-7262 | hsa-asg-7262_st1 | 8.10 | 4.59 | 6.34 | 5.09 | 4.85 | 5.79 | 5.79 | 5.17 |
| hsa-cand830 | hsa-cand830_st2 | 5.41 | 1.05 | 2.83 | 2.15 | 3.44 | 3.64 | 2.80 | 3.03 |
| hsa-asg-9752 | hsa-asg-9752_st2 | 7.19 | 4.35 | 4.25 | 4.54 | 4.32 | 4.52 | 3.97 | 4.84 |
| hsa-asg-7014 | hsa-asg-7014_st2 | 6.34 | 2.58 | 4.83 | 3.72 | 3.71 | 3.81 | 5.26 | 2.14 |
| hsa-asg-2551 | hsa-asg-2551_st1 | 7.60 | 4.15 | 6.06 | 4.16 | 4.75 | 3.55 | 5.91 | 5.10 |
| hsa-asg-4870 | hsa-asg-4870_st1 | 6.44 | 3.05 | 4.21 | 4.42 | 3.80 | 4.17 | 4.67 | 1.78 |
| hsa-asg-4685 | hsa-asg-4685_st1 | 6.35 | 3.31 | 4.50 | 3.52 | 3.25 | 4.36 | 3.32 | 3.03 |
| hsa-asg-6071 | hsa-asg-6071_st2 | 6.08 | 2.41 | 3.86 | 2.63 | 4.25 | 3.45 | 3.81 | 3.27 |
| hsa-asg-3521 | hsa-asg-3521_st2 | 4.92 | 1.83 | 3.58 | 3.38 | 2.00 | 1.98 | 1.12 | 2.31 |
| hsa-asg-12755 | hsa-asg-12755_st2 | 6.62 | 3.64 | 5.81 | 3.66 | 3.80 | 3.18 | 4.38 | 3.48 |
| hsa-asg-12625 | hsa-asg-12625_st1 | 6.26 | 4.22 | 5.33 | 3.59 | 3.44 | 3.18 | 4.05 | 3.57 |
| hsa-asg-2738 | hsa-asg-2738_st2 | 7.70 | 4.35 | 6.02 | 4.42 | 4.51 | 5.16 | 5.94 | 5.33 |
| hsa-asg-12941 | hsa-asg-12941_st1 | 10.64 | 8.98 | 8.54 | 7.03 | 8.48 | 8.59 | 7.83 | 8.03 |
| hsa-miR-381 | hsa-miR-381_st2 | 5.50 | 2.75 | 2.32 | 4.21 | 3.38 | 4.17 | 2.94 | 3.48 |
| hsa-asg-12590 | hsa-asg-12590_st1 | 5.67 | 2.22 | 4.38 | 2.40 | 2.30 | 3.93 | 3.63 | 3.27 |
| hsa-asg-6773 | hsa-asg-6773_st1 | 5.05 | 2.41 | 3.24 | 2.63 | 1.38 | 3.29 | 3.48 | 2.62 |
| hsa-asg-13797 | hsa-asg-13797_st2 | 5.78 | 2.41 | 3.48 | 2.84 | 2.98 | 3.40 | 3.63 | 2.90 |
| hsa-asg-8922 | hsa-asg-8922_st2 | 9.65 | 6.85 | 8.18 | 6.30 | 6.38 | 7.72 | 8.16 | 6.42 |
| hsa-asg-1689 | hsa-asg-1689_st2 | 7.80 | 5.58 | 5.96 | 5.21 | 5.13 | 5.54 | 5.43 | 4.76 |
| hsa-asg-11219 | hsa-asg-11219_st1 | 5.88 | 3.31 | 5.10 | 3.52 | 2.82 | 2.24 | 3.72 | 3.38 |
| hsa-asg-13450 | hsa-asg-13450_st1 | 5.20 | 2.90 | 3.68 | 2.63 | 2.20 | 2.99 | 1.21 | 3.03 |
| hsa-asg-12365 | hsa-asg-12365_st1 | 7.47 | 4.00 | 6.58 | 4.21 | 4.48 | 4.71 | 5.67 | 4.96 |
| hsa-asg-933 | hsa-asg-933_st2 | 9.58 | 7.05 | 7.45 | 6.69 | 7.03 | 7.41 | 7.31 | 6.23 |
| hsa-asg-8174 | hsa-asg-8174_st1 | 5.55 | 3.31 | 4.03 | 2.84 | 2.98 | 2.86 | 3.20 | 2.77 |
| hsa-asg-9574 | hsa-asg-9574_st2 | 8.19 | 6.61 | 6.74 | 4.46 | 5.50 | 5.60 | 6.11 | 5.03 |
| hsa-asg-8397 | hsa-asg-8397_st2 | 5.96 | 3.18 | 5.02 | 3.38 | 2.90 | 3.50 | 4.22 | 2.14 |
| hsa-asg-9319 | hsa-asg-9319_st2 | 6.85 | 3.91 | 5.06 | 4.38 | 3.38 | 5.07 | 4.32 | 3.83 |
| hsa-asg-4080 | hsa-asg-4080_st2 | 5.15 | 3.31 | 3.11 | 1.12 | 2.82 | 2.49 | 2.65 | 3.66 |
| hsa-asg-3900 | hsa-asg-3900_st1 | 5.14 | 3.18 | 3.24 | 3.21 | 3.32 | 2.57 | 2.80 | 3.27 |
| hsa-asg-11056 | hsa-asg-11056_st1 | 5.65 | 2.41 | 4.11 | 2.84 | 3.25 | 2.99 | 3.89 | 3.15 |
| hsa-asg-4915 | hsa-asg-4915_st1 | 5.26 | 2.41 | 3.78 | 2.15 | 2.57 | 3.59 | 2.87 | 2.77 |
| hsa-asg-6500 | hsa-asg-6500_st1 | 7.05 | 4.74 | 4.81 | 4.68 | 4.02 | 5.11 | 5.31 | 3.66 |
| hsa-asg-3716 | hsa-asg-3716_st1 | 7.38 | 5.13 | 5.87 | 3.45 | 4.89 | 5.72 | 4.90 | 4.67 |
| hsa-asg-1351 | hsa-asg-1351_st1 | 6.28 | 4.00 | 5.21 | 3.38 | 2.98 | 3.73 | 4.12 | 3.27 |
| hsa-asg-7385 | hsa-asg-7385_st1 | 7.60 | 4.84 | 5.65 | 4.84 | 5.09 | 5.19 | 5.57 | 5.62 |
| hsa-asg-9879 | hsa-asg-9879_st1 | 5.44 | 2.22 | 4.25 | 2.63 | 3.32 | 3.93 | 3.14 | 2.77 |
| hsa-asg-6381 | hsa-asg-6381_st1 | 6.10 | 4.22 | 4.85 | 2.40 | 3.98 | 3.64 | 4.25 | 3.27 |
| hsa-miR-124a | hsa-cand79_st1 | 5.77 | 3.53 | 3.78 | 3.78 | 4.44 | 3.64 | 2.14 | 2.31 |
| hsa-asg-8986 | hsa-asg-8986_st1 | 7.22 | 4.53 | 5.96 | 4.25 | 4.98 | 3.97 | 5.23 | 4.62 |
| hsa-asg-10457 | hsa-asg-10457_st1 | 5.83 | 3.05 | 3.78 | 2.15 | 3.66 | 3.89 | 4.65 | 2.62 |
| hsa-asg-11656 | hsa-asg-11656_st1 | 6.86 | 3.83 | 5.00 | 4.42 | 5.05 | 4.20 | 4.88 | 4.67 |
| hsa-asg-9573 | hsa-asg-9573_st2 | 5.22 | 2.90 | 3.58 | 2.63 | 2.48 | 3.40 | 2.14 | 3.15 |
| hsa-asg-8602 | hsa-asg-8602_st2 | 7.76 | 4.79 | 6.41 | 5.31 | 5.43 | 5.24 | 5.91 | 4.80 |
| hsa-asg-3061 | hsa-asg-3061_st2 | 7.66 | 5.86 | 6.26 | 4.75 | 5.31 | 5.14 | 5.34 | 4.84 |
| hsa-asg-6135 | hsa-asg-6135_st2 | 6.32 | 3.73 | 4.50 | 4.21 | 3.55 | 4.96 | 4.49 | 4.18 |
| hsa-asg-8972 | hsa-asg-8972_st2 | 5.23 | 1.83 | 3.48 | 1.89 | 2.20 | 3.24 | 3.53 | 3.91 |
| hsa-asg-8703 | hsa-asg-8703_st1 | 5.55 | 2.58 | 3.11 | 1.89 | 3.85 | 3.18 | 3.58 | 3.66 |
| hsa-asg-8522 | hsa-asg-8522_st2 | 6.52 | 4.74 | 4.55 | 4.11 | 4.67 | 4.11 | 3.72 | 3.57 |
| hsa-asg-6116 | hsa-asg-6116_st2 | 4.63 | 2.41 | 2.13 | 1.89 | 1.90 | 2.79 | 3.20 | 3.15 |
| hsa-asg-9781 | hsa-asg-9781_st1 | 7.23 | 4.00 | 5.93 | 4.75 | 4.32 | 4.57 | 5.62 | 4.71 |
| hsa-asg-1727 | hsa-asg-1727_st2 | 7.14 | 5.13 | 6.02 | 4.25 | 4.78 | 4.86 | 5.46 | 3.48 |
| hsa-asg-2894 | hsa-asg-2894_st2 | 5.37 | 3.18 | 3.86 | 2.84 | 1.79 | 2.99 | 2.65 | 3.83 |
| hsa-asg-12922 | hsa-asg-12922_st1 | 6.59 | 4.47 | 4.55 | 3.21 | 4.56 | 4.52 | 4.88 | 3.98 |
| hsa-asg-1715 | hsa-asg-1715_st2 | 5.40 | 3.53 | 3.78 | 3.21 | 2.30 | 2.57 | 3.20 | 4.18 |
| hsa-asg-10580 | hsa-asg-10580_st1 | 10.34 | 7.42 | 8.56 | 7.69 | 8.41 | 7.64 | 8.71 | 8.21 |
| hsa-asg-7183 | hsa-asg-7183_st1 | 5.86 | 3.42 | 4.71 | 3.38 | 3.32 | 3.45 | 3.32 | 3.83 |
| hsa-asg-11797 | hsa-asg-11797_st1 | 7.60 | 5.61 | 6.64 | 3.96 | 5.20 | 5.25 | 6.25 | 4.71 |
| hsa-asg-13091 | hsa-asg-13091_st2 | 8.38 | 4.79 | 7.10 | 5.93 | 6.02 | 5.55 | 7.27 | 6.02 |
| hsa-asg-12684 | hsa-asg-12684_st2 | 10.09 | 8.07 | 8.42 | 7.61 | 7.79 | 7.86 | 8.14 | 7.41 |
| hsa-asg-3841 | hsa-asg-3841_st2 | 8.61 | 6.36 | 5.97 | 5.64 | 6.58 | 6.98 | 6.76 | 5.94 |
| hsa-asg-7228 | hsa-asg-7228_st1 | 7.33 | 5.79 | 6.36 | 4.25 | 4.59 | 5.39 | 5.95 | 4.71 |
| hsa-asg-8643 | hsa-asg-8643_st2 | 6.98 | 3.64 | 5.44 | 5.28 | 4.78 | 4.30 | 5.43 | 5.00 |
| hsa-asg-1296 | hsa-asg-1296_st1 | 5.34 | 3.05 | 2.50 | 4.81 | 2.39 | 2.49 | 2.73 | 3.15 |
| hsa-asg-5662 | hsa-asg-5662_st2 | 6.48 | 4.53 | 5.60 | 3.96 | 4.96 | 3.85 | 4.79 | 3.03 |
| hsa-asg-6614 | hsa-asg-6614_st1 | 6.40 | 4.07 | 5.21 | 2.63 | 3.75 | 5.00 | 4.49 | 3.98 |
| hsa-asg-12119 | hsa-asg-12119_st2 | 6.38 | 4.15 | 4.81 | 4.11 | 4.80 | 3.68 | 4.38 | 3.57 |
| hsa-asg-9053 | hsa-asg-9053_st1 | 7.93 | 5.86 | 6.50 | 4.78 | 6.21 | 6.07 | 6.86 | 4.88 |
| hsa-asg-9270 | hsa-asg-9270_st1 | 4.87 | 2.41 | 3.58 | 2.15 | 3.44 | 2.65 | 3.68 | 1.42 |
| hsa-cand894 | hsa-cand894_st1 | 5.50 | 1.83 | 4.11 | 3.04 | 4.02 | 3.24 | 3.81 | 3.27 |
| hsa-asg-1513 | hsa-asg-1513_st1 | 6.80 | 3.18 | 5.75 | 4.25 | 5.26 | 4.84 | 4.98 | 4.76 |
| hsa-asg-191 | hsa-asg-191_st1 | 5.77 | 3.31 | 3.86 | 2.84 | 3.55 | 3.81 | 4.05 | 3.98 |
| hsa-asg-3815 | hsa-asg-3815_st1 | 6.56 | 3.18 | 5.32 | 4.75 | 4.02 | 4.69 | 4.52 | 3.48 |
| hsa-asg-10181 | hsa-asg-10181_st1 | 7.25 | 4.64 | 6.19 | 5.37 | 4.38 | 5.07 | 5.70 | 4.52 |
| hsa-asg-12697 | hsa-asg-12697_st1 | 5.96 | 3.31 | 4.31 | 4.01 | 3.60 | 3.85 | 4.38 | 3.75 |
| hsa-asg-6269 | hsa-asg-6269_st2 | 7.45 | 5.47 | 6.21 | 4.25 | 4.51 | 5.02 | 5.49 | 4.88 |
| hsa-asg-10114 | hsa-asg-10114_st1 | 6.16 | 4.41 | 4.90 | 4.54 | 3.89 | 3.81 | 5.31 | 3.75 |
| hsa-asg-10399 | hsa-asg-10399_st1 | 5.98 | 3.73 | 4.76 | 4.11 | 3.25 | 3.73 | 4.12 | 3.75 |
| hsa-asg-13266 | hsa-asg-13266_st1 | 5.17 | 3.31 | 4.11 | 3.04 | 2.48 | 3.93 | 2.80 | 2.47 |
| hsa-asg-6000 | hsa-asg-6000_st1 | 6.94 | 5.09 | 5.65 | 4.25 | 4.67 | 4.86 | 5.07 | 3.98 |
| hsa-asg-7166 | hsa-asg-7166_st2 | 5.32 | 2.58 | 3.86 | 3.21 | 2.66 | 3.12 | 3.20 | 3.48 |
| hsa-asg-466 | hsa-asg-466_st1 | 6.61 | 4.07 | 4.63 | 2.74 | 4.96 | 5.22 | 4.43 | 4.84 |
| hsa-asg-6934 | hsa-asg-6934_st2 | 5.16 | 2.75 | 4.50 | 2.40 | 2.57 | 2.72 | 3.97 | 2.77 |
| hsa-asg-265 | hsa-asg-265_st2 | 7.98 | 6.45 | 7.13 | 5.14 | 5.70 | 5.87 | 7.03 | 5.27 |
| hsa-asg-13334 | hsa-asg-13334_st2 | 5.00 | 3.05 | 3.36 | 2.15 | 3.25 | 3.45 | 2.80 | 3.27 |
| hsa-asg-5712 | hsa-asg-5712_st2 | 8.23 | 5.20 | 6.25 | 6.05 | 6.23 | 5.84 | 6.36 | 6.09 |
| hsa-asg-4829 | hsa-asg-4829_st1 | 11.16 | 8.07 | 9.70 | 8.28 | 8.56 | 9.57 | 9.40 | 8.62 |
| hsa-asg-1596 | hsa-asg-1596_st2 | 6.21 | 4.41 | 5.06 | 4.01 | 3.19 | 4.36 | 4.12 | 4.12 |
| hsa-asg-7278 | hsa-asg-7278_st1 | 7.02 | 5.20 | 5.73 | 4.34 | 4.92 | 5.28 | 5.54 | 3.98 |
| hsa-miR-202 | hsa-miR-202_st1 | 6.84 | 4.69 | 5.02 | 4.38 | 4.96 | 5.02 | 5.58 | 3.66 |
| hsa-asg-244 | hsa-asg-244_st1 | 6.62 | 3.31 | 5.23 | 4.65 | 4.44 | 4.14 | 5.21 | 4.52 |
| hsa-asg-3614 | hsa-asg-3614_st1 | 6.47 | 4.79 | 5.36 | 3.59 | 4.38 | 4.00 | 5.11 | 3.83 |
| hsa-asg-3289 | hsa-asg-3289_st1 | 5.48 | 3.64 | 4.25 | 3.21 | 3.89 | 3.06 | 3.81 | 2.47 |
| hsa-asg-11361 | hsa-asg-11361_st2 | 5.36 | 2.75 | 3.48 | 3.38 | 3.25 | 3.59 | 3.32 | 3.83 |
| hsa-asg-8953 | hsa-asg-8953_st1 | 9.78 | 6.78 | 8.45 | 7.10 | 7.73 | 7.26 | 8.40 | 7.21 |
| hsa-asg-572 | hsa-asg-572_st2 | 6.42 | 4.69 | 5.27 | 3.84 | 3.66 | 3.93 | 5.21 | 3.48 |
| hsa-asg-11796 | hsa-asg-11796_st2 | 7.40 | 4.64 | 5.74 | 4.61 | 5.38 | 5.72 | 5.60 | 5.52 |
| hsa-cand630 | hsa-cand630_st2 | 7.05 | 5.17 | 6.10 | 5.26 | 4.53 | 4.96 | 5.64 | 3.75 |
| hsa-asg-9085 | hsa-asg-9085_st1 | 7.47 | 5.44 | 6.38 | 4.90 | 5.18 | 5.47 | 6.50 | 3.98 |
| hsa-asg-3150 | hsa-asg-3150_st1 | 8.11 | 6.39 | 7.40 | 5.51 | 6.17 | 5.96 | 6.77 | 5.67 |
| hsa-asg-6734 | hsa-asg-6734_st2 | 4.81 | 2.41 | 4.18 | 2.84 | 2.74 | 3.06 | 2.73 | 1.96 |
| hsa-asg-1010 | hsa-asg-10104_st2 | 6.67 | 3.53 | 5.74 | 4.87 | 4.44 | 5.11 | 5.37 | 3.91 |
| hsa-asg-7067 | hsa-asg-7067_st1 | 6.44 | 4.35 | 5.41 | 3.38 | 4.35 | 4.17 | 5.07 | 4.12 |
| hsa-asg-11875 | hsa-asg-11875_st1 | 5.82 | 4.53 | 4.50 | 3.38 | 2.82 | 2.99 | 4.05 | 3.48 |
| hsa-asg-9320 | hsa-asg-9320_st2 | 6.74 | 4.41 | 5.88 | 4.38 | 4.28 | 3.97 | 5.21 | 4.88 |
| hsa-asg-9873 | hsa-asg-9873_st1 | 4.90 | 2.58 | 4.11 | 1.63 | 2.57 | 2.65 | 3.01 | 3.15 |
| hsa-asg-5115 | hsa-asg-5115_st1 | 9.09 | 6.97 | 8.00 | 6.75 | 7.15 | 6.96 | 7.34 | 6.17 |
| hsa-asg-12556 | hsa-asg-12556_st1 | 9.59 | 8.06 | 8.67 | 6.55 | 7.78 | 8.32 | 8.39 | 6.96 |
| hsa-asg-807 | hsa-asg-807_st2 | 6.79 | 4.15 | 5.41 | 4.54 | 4.35 | 4.71 | 5.52 | 4.57 |
| hsa-asg-9025 | hsa-asg-9025_st2 | 7.15 | 4.35 | 5.41 | 4.75 | 5.00 | 5.27 | 5.40 | 4.62 |
| hsa-asg-12652 | hsa-asg-12652_st1 | 4.72 | 3.31 | 2.67 | 3.66 | 2.30 | 2.65 | 3.43 | 1.78 |
| hsa-asg-9547 | hsa-asg-9547_st2 | 5.89 | 3.53 | 4.90 | 3.78 | 3.32 | 3.40 | 3.85 | 3.38 |
| hsa-asg-5385 | hsa-asg-5385_st2 | 7.71 | 5.79 | 6.49 | 5.59 | 5.50 | 5.73 | 6.35 | 5.20 |
| hsa-asg-13661 | hsa-asg-13661_st1 | 6.94 | 5.64 | 5.46 | 3.30 | 4.92 | 5.46 | 5.18 | 4.76 |
| hsa-asg-7178 | hsa-asg-7178_st1 | 6.97 | 4.29 | 6.06 | 4.16 | 4.48 | 5.00 | 5.69 | 4.42 |
| hsa-cand173 | hsa-cand173_st1 | 7.98 | 6.74 | 7.22 | 5.91 | 5.65 | 6.21 | 6.24 | 5.03 |
| hsa-asg-1981 | hsa-asg-1981_st1 | 5.50 | 3.64 | 4.76 | 3.52 | 2.82 | 3.35 | 3.53 | 2.90 |
| hsa-asg-477 | hsa-asg-477_st1 | 7.08 | 4.97 | 5.88 | 4.11 | 4.73 | 4.76 | 5.75 | 4.67 |
| hsa-asg-11742 | hsa-asg-11742_st2 | 5.80 | 3.42 | 4.61 | 3.04 | 3.32 | 4.57 | 4.65 | 2.77 |
| hsa-asg-7776 | hsa-asg-7776_st2 | 6.48 | 3.73 | 5.30 | 4.34 | 3.89 | 4.24 | 5.50 | 5.07 |
| hsa-asg-7215 | hsa-asg-7215_st2 | 7.21 | 5.31 | 6.09 | 4.81 | 5.78 | 5.12 | 5.71 | 4.71 |
| hsa-asg-4814 | hsa-asg-4814_st1 | 8.13 | 6.51 | 7.06 | 5.35 | 6.03 | 6.30 | 6.85 | 5.41 |
| hsa-asg-9163 | hsa-asg-9163_st2 | 5.74 | 4.07 | 4.76 | 2.84 | 3.80 | 3.24 | 4.43 | 2.90 |
| hsa-asg-9453 | hsa-asg-9453_st2 | 8.82 | 7.57 | 8.10 | 6.21 | 6.88 | 7.39 | 7.53 | 6.23 |
| hsa-asg-8404 | hsa-asg-8404_st2 | 5.49 | 2.22 | 4.25 | 3.04 | 3.55 | 4.17 | 3.63 | 3.57 |
| hsa-asg-8926 | hsa-asg-8926_st1 | 6.88 | 4.59 | 5.43 | 4.25 | 4.75 | 5.03 | 5.56 | 4.62 |
| hsa-asg-10962 | hsa-asg-10962_st1 | 5.23 | 2.58 | 2.67 | 4.21 | 3.05 | 2.99 | 4.05 | 3.03 |
| hsa-asg-225 | hsa-asg-225_st1 | 7.45 | 5.64 | 6.52 | 5.12 | 5.75 | 5.48 | 5.79 | 4.84 |
| hsa-asg-8512 | hsa-asg-8512_st2 | 5.89 | 4.41 | 4.44 | 3.21 | 4.21 | 4.04 | 3.63 | 3.48 |
| hsa-asg-6941 | hsa-asg-6941_st2 | 6.31 | 3.42 | 4.25 | 4.11 | 4.02 | 4.71 | 5.31 | 4.18 |
| hsa-asg-956 | hsa-asg-956_st2 | 4.81 | 3.53 | 3.58 | 2.84 | 2.48 | 2.33 | 3.32 | 2.47 |
| hsa-asg-7344 | hsa-asg-7344_st2 | 6.32 | 3.91 | 5.25 | 4.21 | 4.02 | 4.41 | 4.12 | 4.52 |
| hsa-cand624 | hsa-cand624_st1 | 8.69 | 6.15 | 7.84 | 5.97 | 6.52 | 6.47 | 7.40 | 6.19 |
| hsa-asg-12925 | hsa-asg-12925_st1 | 9.30 | 8.27 | 8.12 | 6.40 | 7.75 | 7.69 | 7.64 | 6.72 |
| hsa-asg-12989 | hsa-asg-12989_st2 | 5.51 | 3.64 | 4.31 | 2.63 | 3.32 | 3.40 | 3.68 | 4.12 |
| hsa-asg-6618 | hsa-asg-6618_st2 | 7.22 | 5.47 | 5.94 | 4.50 | 5.31 | 5.71 | 6.06 | 4.92 |
| hsa-asg-3296 | hsa-asg-3296_st1 | 6.02 | 3.73 | 4.81 | 3.21 | 3.25 | 4.71 | 4.83 | 3.91 |
| hsa-asg-3003 | hsa-asg-3003_st1 | 5.84 | 3.73 | 4.90 | 4.01 | 3.05 | 4.24 | 4.60 | 2.62 |
| hsa-asg-3155 | hsa-asg-3155_st1 | 7.20 | 5.64 | 5.47 | 5.37 | 4.89 | 5.61 | 4.92 | 5.27 |
| hsa-miR-7 | hsa-miR-7_st1 | 10.44 | 9.45 | 8.18 | 9.71 | 8.61 | 8.16 | 7.65 | 8.64 |
| hsa-asg-6792 | hsa-asg-6792_st1 | 7.90 | 5.86 | 6.91 | 5.26 | 5.93 | 6.10 | 6.84 | 5.10 |
| hsa-asg-12395 | hsa-asg-12395_st2 | 7.48 | 4.93 | 5.80 | 4.78 | 5.96 | 6.82 | 6.08 | 5.20 |
| hsa-asg-2045 | hsa-asg-2045_st1 | 8.23 | 5.69 | 7.16 | 5.74 | 6.46 | 5.94 | 6.89 | 5.69 |
| hsa-asg-3745 | hsa-asg-3745_st1 | 8.10 | 6.03 | 7.05 | 5.41 | 5.93 | 6.90 | 6.19 | 5.53 |
| hsa-miR189 | hsa-miR189_st2 | 6.40 | 4.00 | 5.60 | 3.84 | 4.38 | 4.64 | 5.40 | 4.36 |
| hsa-asg-4767 | hsa-asg-4767_st1 | 6.46 | 4.35 | 5.57 | 4.84 | 3.89 | 4.47 | 4.15 | 4.12 |
| hsa-asg-9849 | hsa-asg-9849_st2 | 8.49 | 6.37 | 7.98 | 5.47 | 6.39 | 6.76 | 7.48 | 6.11 |
| hsa-asg-394 | hsa-asg-394_st1 | 5.42 | 3.42 | 3.95 | 3.66 | 2.48 | 3.59 | 3.89 | 3.57 |
| hsa-asg-4061 | hsa-asg-4061_st1 | 8.69 | 5.79 | 7.95 | 6.30 | 6.52 | 6.79 | 7.36 | 6.47 |
| hsa-asg-8931 | hsa-asg-8931_st1 | 6.27 | 4.59 | 4.85 | 3.90 | 4.32 | 4.04 | 4.25 | 4.76 |
| hsa-asg-4055 | hsa-asg-4055_st1 | 5.28 | 3.05 | 2.50 | 3.52 | 3.38 | 3.97 | 3.72 | 3.57 |
| hsa-asg-6866 | hsa-asg-6866_st2 | 5.14 | 1.83 | 3.48 | 3.04 | 3.44 | 3.45 | 3.63 | 3.15 |
| hsa-asg-10802 | hsa-asg-10802_st2 | 6.13 | 4.22 | 5.10 | 3.52 | 3.89 | 4.30 | 4.88 | 3.66 |
| hsa-asg-13197 | hsa-asg-13197_st1 | 4.66 | 2.41 | 2.67 | 3.38 | 3.25 | 2.16 | 2.94 | 2.47 |
| hsa-asg-4964 | hsa-asg-4964_st2 | 6.63 | 4.79 | 5.02 | 3.21 | 4.78 | 5.05 | 4.98 | 4.67 |
| hsa-asg-242 | hsa-asg-242_st2 | 6.43 | 4.64 | 4.90 | 5.19 | 4.82 | 4.41 | 4.32 | 3.48 |
| hsa-asg-4693 | hsa-asg-4693_st1 | 6.93 | 5.05 | 5.74 | 4.21 | 5.38 | 5.00 | 5.21 | 4.52 |
| hsa-asg-1127 | hsa-asg-1127_st2 | 5.32 | 3.64 | 4.03 | 3.52 | 2.98 | 3.64 | 4.19 | 3.75 |
| hsa-asg-1172 | hsa-asg-1172_st2 | 6.42 | 4.97 | 5.32 | 4.01 | 4.32 | 5.50 | 5.54 | 4.05 |
| hsa-asg-12214 | hsa-asg-12214_st1 | 6.53 | 4.22 | 5.65 | 4.50 | 4.28 | 4.24 | 4.94 | 4.47 |
| hsa-asg-1241 | hsa-asg-1241_st2 | 8.85 | 6.75 | 7.68 | 5.81 | 6.87 | 7.23 | 7.62 | 6.45 |
| hsa-asg-10832 | hsa-asg-10832_st1 | 6.06 | 4.35 | 4.94 | 3.66 | 4.28 | 3.64 | 4.43 | 3.57 |
| hsa-cand668 | hsa-cand668_st1 | 9.39 | 6.64 | 7.73 | 6.89 | 7.67 | 7.60 | 7.76 | 7.33 |
| hsa-asg-7900 | hsa-asg-7900_st1 | 6.87 | 4.41 | 6.30 | 4.50 | 5.03 | 4.47 | 5.66 | 4.36 |
| hsa-miR-518c* | hsa-miR-518c-_st2 | 5.78 | 3.83 | 5.14 | 4.38 | 3.12 | 3.35 | 4.38 | 3.66 |
| hsa-asg-1576 | hsa-asg-1576_st1 | 9.26 | 7.85 | 8.09 | 6.65 | 7.36 | 8.04 | 7.46 | 7.09 |
| hsa-asg-3109 | hsa-asg-3109_st2 | 5.60 | 4.53 | 4.18 | 2.84 | 3.89 | 4.90 | 4.25 | 2.90 |
| hsa-asg-3771 | hsa-asg-3771_st1 | 6.05 | 3.42 | 4.38 | 4.11 | 4.62 | 5.00 | 4.74 | 3.66 |
| hsa-asg-4440 | hsa-asg-4440_st1 | 7.20 | 5.93 | 5.71 | 5.51 | 5.83 | 6.14 | 5.49 | 4.88 |
| hsa-asg-7671 | hsa-asg-7671_st1 | 7.99 | 6.24 | 7.39 | 5.76 | 6.13 | 6.82 | 6.90 | 5.60 |
| hsa-asg-11795 | hsa-asg-11795_st2 | 7.17 | 5.09 | 6.45 | 5.45 | 4.92 | 5.99 | 5.72 | 4.76 |
| hsa-asg-8731 | hsa-asg-8731_st2 | 6.18 | 3.91 | 4.85 | 4.30 | 4.02 | 4.80 | 4.25 | 3.83 |
| hsa-asg-10510 | hsa-asg-10510_st2 | 5.59 | 3.42 | 4.18 | 3.90 | 3.66 | 2.72 | 3.53 | 4.31 |
| hsa-asg-3744 | hsa-asg-3744_st1 | 6.59 | 4.74 | 5.69 | 4.38 | 5.13 | 4.90 | 5.48 | 3.38 |
| hsa-asg-1716 | hsa-asg-1716_st1 | 6.54 | 4.59 | 5.36 | 4.50 | 4.38 | 4.38 | 5.11 | 4.18 |
| hsa-asg-4703 | hsa-asg-4703_st2 | 6.95 | 5.34 | 6.13 | 4.61 | 4.87 | 5.70 | 5.84 | 4.76 |
| hsa-asg-13135 | hsa-asg-13135_st1 | 6.81 | 5.61 | 5.61 | 5.24 | 4.89 | 4.76 | 4.70 | 5.14 |
| hsa-asg-5326 | hsa-asg-5326_st2 | 7.99 | 6.95 | 7.13 | 5.74 | 6.26 | 6.65 | 6.47 | 5.52 |
| hsa-asg-11898 | hsa-asg-11898_st2 | 6.42 | 4.53 | 5.50 | 4.75 | 3.98 | 4.66 | 4.88 | 3.91 |
| hsa-miR-565 | hsa-miR-565_st1 | 8.93 | 7.20 | 7.07 | 7.80 | 6.92 | 5.73 | 7.61 | 7.76 |
| hsa-asg-7224 | hsa-asg-7224_st2 | 8.55 | 6.70 | 7.80 | 5.73 | 7.16 | 7.20 | 7.60 | 6.09 |
| hsa-asg-3970 | hsa-asg-3970_st2 | 4.49 | 2.75 | 3.36 | 1.89 | 2.30 | 2.16 | 3.43 | 2.31 |
| hsa-asg-9334 | hsa-asg-9334_st2 | 8.40 | 6.32 | 7.60 | 6.15 | 6.41 | 6.92 | 7.31 | 6.22 |
| hsa-asg-92 | hsa-asg-92_st1 | 6.17 | 4.15 | 5.53 | 4.01 | 4.14 | 4.24 | 5.15 | 3.83 |
| hsa-asg-7174 | hsa-asg-7174_st2 | 7.74 | 5.20 | 6.63 | 5.79 | 5.33 | 5.76 | 7.07 | 5.78 |
| hsa-asg-7133 | hsa-asg-7133_st1 | 7.36 | 4.88 | 6.33 | 5.62 | 5.00 | 5.66 | 6.13 | 4.96 |
| hsa-asg-7023 | hsa-asg-7023_st2 | 6.02 | 4.15 | 4.55 | 4.21 | 4.02 | 4.57 | 4.38 | 4.18 |
| hsa-asg-11096 | hsa-asg-11096_st1 | 8.25 | 5.74 | 7.49 | 6.18 | 6.03 | 6.22 | 7.30 | 6.48 |
| hsa-asg-3998 | hsa-asg-3998_st1 | 10.40 | 8.62 | 8.53 | 8.70 | 9.41 | 8.74 | 8.32 | 9.20 |
| hsa-asg-9629 | hsa-asg-9629_st2 | 6.42 | 4.93 | 5.35 | 4.21 | 4.51 | 5.11 | 4.96 | 3.98 |
| hsa-miR-9* | hsa-miR-9-_st2 | 7.20 | 6.19 | 6.05 | 5.57 | 6.10 | 5.37 | 5.81 | 4.92 |
| hsa-asg-8948 | hsa-asg-8948_st2 | 5.69 | 4.29 | 4.31 | 2.40 | 4.44 | 4.36 | 4.25 | 3.57 |
| hsa-asg-13598 | hsa-asg-13598_st1 | 7.20 | 5.58 | 6.43 | 4.96 | 5.53 | 6.03 | 6.27 | 4.31 |
| hsa-asg-7131 | hsa-asg-7131_st1 | 8.57 | 6.24 | 7.21 | 6.71 | 7.29 | 6.60 | 7.16 | 6.28 |
| hsa-cand960 | hsa-cand960_st2 | 6.50 | 4.97 | 5.80 | 4.25 | 4.67 | 5.28 | 5.04 | 4.76 |
| hsa-asg-2237 | hsa-asg-2237_st1 | 6.02 | 4.93 | 4.66 | 3.90 | 4.82 | 4.24 | 3.89 | 4.12 |
| hsa-asg-10426 | hsa-asg-10426_st1 | 6.72 | 5.27 | 6.07 | 4.54 | 4.59 | 4.82 | 5.70 | 4.18 |
| hsa-asg-1591 | hsa-asg-1591_st2 | 6.37 | 4.79 | 5.50 | 4.01 | 4.87 | 4.52 | 4.38 | 4.57 |
| hsa-asg-2042 | hsa-asg-2042_st2 | 6.89 | 4.88 | 5.91 | 4.38 | 5.17 | 4.84 | 5.28 | 5.00 |
| hsa-asg-1815 | hsa-asg-1815_st1 | 7.80 | 6.01 | 6.70 | 5.09 | 6.19 | 7.04 | 6.69 | 5.38 |
| hsa-asg-2342 | hsa-asg-2342_st2 | 8.58 | 6.92 | 7.60 | 6.15 | 6.71 | 7.09 | 7.65 | 6.12 |
| hsa-asg-13316 | hsa-asg-13316_st1 | 6.41 | 4.00 | 5.74 | 3.90 | 4.56 | 4.66 | 5.49 | 4.52 |
| hsa-asg-4007 | hsa-asg-4007_st2 | 5.41 | 3.31 | 4.25 | 3.66 | 4.02 | 3.89 | 4.25 | 2.90 |
| hsa-asg-999 | hsa-asg-999_st2 | 6.26 | 3.91 | 4.66 | 4.99 | 4.80 | 4.80 | 4.05 | 4.52 |
| hsa-asg-18 | hsa-asg-18_st1 | 6.77 | 5.81 | 5.78 | 4.34 | 4.96 | 4.90 | 5.94 | 4.76 |
| hsa-asg-2542 | hsa-asg-2542_st1 | 6.47 | 4.69 | 4.83 | 3.72 | 4.62 | 5.16 | 5.21 | 4.96 |
| hsa-asg-8636 | hsa-asg-8636_st2 | 7.73 | 5.84 | 6.86 | 5.43 | 5.53 | 6.21 | 6.65 | 5.64 |
| hsa-asg-11900 | hsa-asg-11900_st1 | 7.29 | 5.34 | 6.05 | 5.37 | 5.50 | 6.18 | 5.07 | 6.12 |
| hsa-asg-8617 | hsa-asg-8617_st1 | 10.31 | 7.74 | 9.23 | 8.02 | 9.09 | 8.38 | 8.78 | 8.38 |
| hsa-asg-8188 | hsa-asg-8188_st1 | 8.60 | 7.37 | 8.04 | 6.15 | 6.88 | 7.25 | 7.06 | 6.32 |
| hsa-asg-3587 | hsa-asg-3587_st1 | 6.52 | 5.24 | 5.63 | 4.25 | 5.33 | 5.58 | 5.02 | 4.42 |
| hsa-asg-12814 | hsa-asg-12814_st2 | 5.23 | 3.42 | 4.55 | 2.63 | 4.25 | 3.64 | 4.38 | 3.38 |
| hsa-asg-12146 | hsa-asg-12146_st2 | 7.10 | 5.44 | 5.96 | 4.90 | 5.47 | 5.75 | 5.77 | 4.84 |
| hsa-asg-2318 | hsa-asg-2318_st1 | 8.27 | 6.54 | 7.57 | 6.25 | 6.23 | 6.82 | 7.24 | 6.00 |
| hsa-asg-5875 | hsa-asg-5875_st2 | 4.42 | 2.90 | 3.86 | 2.40 | 1.90 | 2.65 | 2.94 | 2.62 |
| hsa-asg-8159 | hsa-asg-8159_st1 | 7.57 | 5.47 | 6.55 | 4.96 | 5.80 | 6.07 | 6.47 | 6.12 |
| hsa-asg-10731 | hsa-asg-10731_st1 | 5.55 | 4.53 | 3.78 | 3.66 | 3.75 | 4.86 | 3.58 | 3.48 |
| hsa-asg-13779 | hsa-asg-13779_st2 | 6.57 | 4.53 | 5.80 | 4.65 | 5.09 | 4.73 | 5.43 | 4.31 |
| hsa-miR-566 | hsa-miR-566_st1 | 7.45 | 6.72 | 6.12 | 5.12 | 5.83 | 6.11 | 6.10 | 5.55 |
| hsa-asg-9886 | hsa-asg-9886_st2 | 8.08 | 5.90 | 7.21 | 5.76 | 5.63 | 6.76 | 7.19 | 6.21 |
| hsa-asg-9511 | hsa-asg-9511_st2 | 8.23 | 6.96 | 7.27 | 6.18 | 6.81 | 7.12 | 7.02 | 5.88 |
| hsa-cand109 | hsa-cand109_st1 | 8.57 | 6.97 | 7.70 | 6.23 | 6.78 | 7.61 | 7.41 | 6.69 |
| hsa-asg-10971 | hsa-asg-10971_st2 | 7.56 | 6.22 | 6.90 | 5.39 | 5.96 | 6.17 | 5.98 | 5.98 |
| hsa-asg-6422 | hsa-asg-6422_st2 | 5.76 | 3.83 | 5.44 | 3.90 | 3.98 | 3.55 | 4.12 | 3.66 |
| hsa-asg-11500 | hsa-asg-11500_st1 | 6.39 | 4.97 | 5.23 | 4.78 | 4.87 | 4.44 | 5.11 | 4.18 |
| hsa-asg-8121 | hsa-asg-8121_st2 | 7.00 | 4.74 | 6.23 | 5.31 | 4.96 | 5.54 | 5.49 | 5.10 |
| hsa-asg-5880 | hsa-asg-5880_st1 | 5.96 | 4.64 | 5.78 | 3.72 | 4.17 | 4.44 | 3.97 | 4.12 |
| hsa-asg-3714 | hsa-asg-3714_st1 | 7.79 | 6.91 | 6.48 | 5.24 | 5.86 | 6.97 | 6.44 | 5.98 |
| hsa-asg-11228 | hsa-asg-11228_st1 | 9.00 | 7.31 | 8.32 | 6.80 | 7.06 | 7.21 | 7.93 | 7.07 |
| hsa-asg-80 | hsa-asg-80_st1 | 6.30 | 4.53 | 5.12 | 4.42 | 4.87 | 4.86 | 4.19 | 4.18 |
| hsa-asg-11990 | hsa-asg-11990_st1 | 6.62 | 4.59 | 5.54 | 4.71 | 5.17 | 4.90 | 6.17 | 4.18 |
| hsa-asg-14051 | hsa-asg-14051_st2 | 8.10 | 6.09 | 7.27 | 5.94 | 5.91 | 6.88 | 7.07 | 6.09 |
| hsa-asg-9399 | hsa-asg-9399_st2 | 6.73 | 5.40 | 5.72 | 4.54 | 4.85 | 5.72 | 5.18 | 4.88 |
| hsa-asg-6924 | hsa-asg-6924_st1 | 8.07 | 6.53 | 7.33 | 6.10 | 7.10 | 6.12 | 6.92 | 6.35 |
| hsa-asg-10259 | hsa-asg-10259_st1 | 7.09 | 5.13 | 6.34 | 5.19 | 5.22 | 6.50 | 5.60 | 4.88 |
| hsa-asg-2150 | hsa-asg-2150_st2 | 5.30 | 3.83 | 4.61 | 3.78 | 3.55 | 3.93 | 4.22 | 4.12 |
| hsa-asg-7027 | hsa-asg-7027_st2 | 6.88 | 5.47 | 6.08 | 5.12 | 5.29 | 5.07 | 6.14 | 4.80 |
| hsa-asg-8932 | hsa-asg-8932_st1 | 5.68 | 4.69 | 4.90 | 3.90 | 3.38 | 3.81 | 4.19 | 3.57 |
| hsa-miR-422a | hsa-miR-422a_st1 | 10.71 | 9.09 | 8.97 | 9.17 | 9.80 | 8.95 | 8.80 | 9.67 |
| hsa-asg-2468 | hsa-asg-2468_st2 | 4.30 | 2.22 | 3.48 | 1.89 | 2.82 | 3.29 | 3.53 | 2.31 |
| hsa-asg-3347 | hsa-asg-3347_st2 | 5.10 | 2.75 | 3.48 | 3.04 | 3.75 | 3.50 | 3.77 | 3.75 |
| hsa-asg-128 | hsa-asg-128_st2 | 6.08 | 4.84 | 4.71 | 4.54 | 5.11 | 4.52 | 4.12 | 4.96 |
| hsa-asg-819 | hsa-asg-819_st1 | 9.01 | 7.79 | 8.45 | 6.60 | 7.27 | 7.45 | 8.01 | 6.94 |
| hsa-asg-3503 | hsa-asg-3503_st2 | 5.17 | 3.31 | 3.68 | 3.38 | 3.12 | 3.97 | 3.32 | 3.15 |
| hsa-asg-4971 | hsa-asg-4971_st1 | 7.43 | 5.64 | 6.65 | 5.39 | 5.63 | 5.58 | 6.54 | 5.03 |
| hsa-asg-8115 | hsa-asg-8115_st2 | 5.03 | 3.53 | 4.03 | 3.04 | 3.98 | 3.06 | 3.32 | 3.38 |
| hsa-cand892 | hsa-cand892_st1 | 6.56 | 4.69 | 5.68 | 4.34 | 4.89 | 4.96 | 5.99 | 4.57 |
| hsa-asg-10007 | hsa-asg-10007_st1 | 8.84 | 7.15 | 7.80 | 6.62 | 7.01 | 7.45 | 7.60 | 6.98 |
| hsa-asg-8565 | hsa-asg-8565_st1 | 7.80 | 6.55 | 7.29 | 5.69 | 6.16 | 6.72 | 6.99 | 5.62 |
| hsa-asg-4372 | hsa-asg-4372_st2 | 7.77 | 6.03 | 6.76 | 5.57 | 5.91 | 5.98 | 7.06 | 5.86 |
| hsa-asg-4843 | hsa-asg-4843_st2 | 7.67 | 5.90 | 6.72 | 5.85 | 6.07 | 6.12 | 6.30 | 5.55 |
| hsa-asg-9870 | hsa-asg-9870_st2 | 6.59 | 5.05 | 5.79 | 4.30 | 4.82 | 5.58 | 5.67 | 4.62 |
| hsa-asg-6183 | hsa-asg-6183_st1 | 7.95 | 6.20 | 7.28 | 5.76 | 6.32 | 6.78 | 7.19 | 5.80 |
| hsa-asg-7429 | hsa-asg-7429_st1 | 5.74 | 3.73 | 5.38 | 3.78 | 3.66 | 4.24 | 4.60 | 4.25 |
| hsa-asg-10805 | hsa-asg-10805_st1 | 8.42 | 7.52 | 7.33 | 6.30 | 6.99 | 7.21 | 7.30 | 5.76 |
| hsa-asg-105 | hsa-asg-105_st1 | 5.71 | 3.73 | 4.94 | 3.66 | 3.94 | 4.80 | 4.19 | 3.57 |
| hsa-asg-1997 | hsa-asg-1997_st1 | 6.31 | 4.53 | 5.35 | 4.11 | 4.02 | 4.84 | 5.34 | 4.71 |
| hsa-asg-2592 | hsa-asg-2592_st1 | 7.97 | 6.50 | 7.12 | 5.55 | 6.41 | 6.78 | 6.72 | 6.42 |
| hsa-asg-11943 | hsa-asg-11943_st1 | 6.64 | 5.24 | 5.75 | 4.96 | 4.87 | 5.05 | 6.00 | 4.80 |
| hsa-asg-12681 | hsa-asg-12681_st1 | 10.59 | 9.39 | 9.67 | 8.50 | 8.88 | 9.36 | 9.45 | 8.31 |
| hsa-asg-7463 | hsa-asg-7463_st1 | 7.02 | 5.76 | 5.92 | 5.26 | 5.26 | 5.33 | 5.78 | 5.36 |
| hsa-asg-4715 | hsa-asg-4715_st1 | 5.67 | 3.83 | 5.06 | 3.04 | 4.17 | 4.30 | 4.54 | 3.98 |
| hsa-asg-5032 | hsa-asg-5032_st2 | 9.45 | 8.73 | 8.68 | 7.37 | 7.60 | 8.41 | 8.30 | 7.13 |
| hsa-asg-3064 | hsa-asg-3064_st2 | 5.05 | 3.18 | 4.25 | 3.04 | 3.71 | 3.59 | 3.81 | 2.62 |
| hsa-asg-4100 | hsa-asg-4100_st1 | 6.49 | 4.74 | 5.25 | 5.14 | 4.62 | 5.21 | 5.57 | 4.80 |
| hsa-asg-7214 | hsa-asg-7214_st1 | 6.53 | 4.35 | 5.94 | 4.65 | 4.56 | 5.22 | 5.70 | 5.10 |
| hsa-asg-4001 | hsa-asg-4001_st1 | 5.19 | 3.53 | 4.18 | 2.84 | 3.98 | 3.73 | 4.05 | 3.03 |
| hsa-asg-8687 | hsa-asg-8687_st1 | 8.25 | 6.37 | 7.78 | 5.82 | 6.51 | 7.19 | 7.07 | 6.30 |
| hsa-asg-6569 | hsa-asg-6569_st2 | 5.48 | 4.64 | 4.11 | 3.78 | 3.50 | 4.24 | 4.25 | 3.48 |
| hsa-asg-7053 | hsa-asg-7053_st2 | 7.45 | 5.52 | 6.79 | 5.33 | 5.62 | 5.93 | 6.19 | 5.80 |
| hsa-asg-3694 | hsa-asg-3694_st1 | 7.33 | 6.27 | 6.68 | 5.43 | 5.09 | 5.51 | 6.02 | 5.36 |
| hsa-asg-1762 | hsa-asg-1762_st1 | 9.53 | 7.86 | 8.20 | 7.23 | 8.24 | 9.03 | 8.02 | 7.61 |
| hsa-asg-8655 | hsa-asg-8655_st1 | 8.17 | 6.39 | 6.84 | 6.30 | 6.21 | 6.86 | 7.25 | 6.50 |
| hsa-asg-3156 | hsa-asg-3156_st1 | 6.34 | 4.93 | 5.53 | 4.61 | 4.73 | 4.96 | 4.49 | 4.42 |
| hsa-asg-10448 | hsa-asg-10448_st2 | 5.35 | 4.00 | 4.76 | 3.38 | 3.75 | 3.55 | 4.12 | 3.38 |
| hsa-asg-7170 | hsa-asg-7170_st2 | 5.35 | 4.22 | 3.78 | 3.21 | 4.10 | 3.81 | 4.70 | 3.48 |
| hsa-asg-13296 | hsa-asg-13296_st2 | 5.40 | 3.91 | 4.85 | 3.38 | 3.89 | 4.30 | 4.12 | 4.05 |
| hsa-asg-12979 | hsa-asg-12979_st1 | 7.56 | 5.81 | 7.02 | 5.57 | 6.01 | 6.45 | 6.64 | 5.33 |
| hsa-asg-9409 | hsa-asg-9409_st1 | 6.80 | 5.47 | 5.40 | 5.51 | 5.71 | 5.17 | 5.42 | 4.31 |
| hsa-asg-7475 | hsa-asg-7475_st1 | 5.46 | 3.53 | 4.11 | 3.78 | 4.21 | 4.57 | 3.72 | 3.57 |
| hsa-asg-12893 | hsa-asg-12893_st2 | 5.51 | 3.73 | 4.71 | 3.66 | 3.98 | 4.11 | 4.83 | 3.15 |
| hsa-asg-8311 | hsa-asg-8311_st1 | 6.10 | 5.58 | 3.95 | 4.54 | 4.85 | 4.80 | 4.88 | 4.42 |
| hsa-asg-4031 | hsa-asg-4031_st2 | 9.40 | 8.14 | 8.64 | 7.15 | 7.73 | 8.26 | 8.27 | 7.59 |
| hsa-asg-3941 | hsa-asg-3941_st2 | 8.18 | 6.26 | 7.55 | 5.82 | 6.57 | 7.23 | 7.44 | 6.35 |
| hsa-asg-8068 | hsa-asg-8068_st2 | 7.63 | 6.73 | 6.65 | 5.59 | 5.96 | 6.42 | 6.58 | 5.86 |
| hsa-miR203 | hsa-miR203_st1 | 7.51 | 6.05 | 6.89 | 5.91 | 5.49 | 5.97 | 6.40 | 5.74 |
| hsa-asg-773 | hsa-asg-773_st1 | 8.29 | 7.21 | 7.41 | 6.30 | 6.35 | 7.33 | 6.73 | 6.33 |
| hsa-asg-9117 | hsa-asg-9117_st1 | 6.97 | 5.50 | 6.36 | 5.21 | 5.52 | 5.33 | 6.28 | 5.38 |
| hsa-asg-8946 | hsa-asg-8946_st1 | 5.84 | 4.22 | 4.98 | 4.01 | 3.85 | 4.71 | 5.21 | 3.57 |
| hsa-miR-510 | hsa-miR-510_st2 | 6.20 | 5.27 | 5.02 | 4.75 | 4.65 | 4.71 | 5.04 | 4.52 |
| hsa-asg-7130 | hsa-asg-7130_st1 | 6.77 | 4.93 | 6.25 | 4.65 | 5.34 | 5.51 | 6.13 | 4.67 |
| hsa-asg-11652 | hsa-asg-11652_st1 | 7.02 | 5.76 | 6.35 | 4.65 | 5.50 | 5.94 | 6.13 | 4.92 |
| hsa-asg-9484 | hsa-asg-9484_st2 | 8.80 | 7.05 | 8.01 | 6.86 | 6.79 | 7.55 | 7.50 | 6.91 |
| hsa-asg-4863 | hsa-asg-4863_st1 | 6.49 | 5.17 | 5.40 | 4.34 | 5.28 | 5.34 | 5.04 | 4.62 |
| hsa-asg-7617 | hsa-asg-7617_st1 | 8.62 | 7.59 | 7.81 | 6.79 | 7.34 | 7.25 | 7.58 | 6.99 |
| hsa-asg-12512 | hsa-asg-12512_st1 | 6.03 | 5.27 | 4.50 | 4.61 | 4.25 | 5.03 | 4.74 | 4.36 |
| hsa-asg-8682 | hsa-asg-8682_st2 | 5.82 | 4.22 | 4.61 | 5.09 | 4.80 | 4.11 | 4.79 | 3.75 |
| hsa-asg-11747 | hsa-asg-11747_st1 | 7.55 | 5.71 | 6.76 | 5.33 | 6.00 | 6.22 | 6.33 | 5.83 |
| hsa-cand6 | hsa-cand6_st2 | 8.25 | 7.03 | 7.79 | 6.10 | 6.90 | 7.17 | 7.36 | 6.27 |
| hsa-miR165 | hsa-miR165_st1 | 6.53 | 5.66 | 5.71 | 5.31 | 5.17 | 5.40 | 5.43 | 4.71 |
| hsa-asg-9167 | hsa-asg-9167_st1 | 6.90 | 5.34 | 6.14 | 5.31 | 5.39 | 5.67 | 5.76 | 5.33 |
| hsa-asg-3335 | hsa-asg-3335_st1 | 8.09 | 6.19 | 7.04 | 6.10 | 6.97 | 7.40 | 7.00 | 6.11 |
| hsa-cand764 | hsa-cand764_st1 | 7.14 | 5.86 | 6.04 | 5.55 | 5.73 | 6.35 | 6.04 | 5.03 |
| hsa-asg-6339 | hsa-asg-6339_st1 | 8.73 | 7.51 | 8.13 | 6.67 | 7.33 | 7.99 | 7.78 | 6.59 |
| hsa-asg-5740 | hsa-asg-5740_st2 | 6.40 | 5.71 | 5.74 | 4.81 | 5.31 | 5.50 | 5.11 | 4.62 |
| hsa-asg-8508 | hsa-asg-8508_st2 | 5.92 | 4.47 | 5.59 | 4.30 | 4.02 | 4.17 | 5.04 | 4.47 |
| hsa-asg-2712 | hsa-asg-2712_st1 | 5.98 | 4.47 | 5.02 | 4.38 | 4.38 | 4.47 | 5.00 | 4.25 |
| hsa-asg-6892 | hsa-asg-6892_st2 | 8.53 | 7.42 | 7.70 | 6.32 | 6.79 | 7.86 | 7.49 | 6.68 |
| hsa-asg-9710 | hsa-asg-9710_st1 | 6.00 | 5.09 | 5.10 | 4.01 | 4.65 | 4.98 | 4.92 | 4.36 |
| hsa-asg-4246 | hsa-asg-4246_st2 | 6.16 | 4.59 | 5.41 | 4.75 | 4.87 | 5.17 | 4.92 | 4.25 |
| hsa-asg-2114 | hsa-asg-2114_st1 | 5.17 | 3.05 | 4.25 | 4.01 | 3.55 | 4.27 | 3.58 | 4.12 |
| hsa-asg-8160 | hsa-asg-8160_st2 | 8.39 | 6.86 | 7.61 | 6.38 | 6.98 | 7.48 | 7.48 | 6.27 |
| hsa-asg-11563 | hsa-asg-11563_st2 | 7.92 | 6.19 | 7.32 | 5.94 | 6.22 | 7.21 | 6.77 | 6.32 |
| hsa-asg-9946 | hsa-asg-9946_st1 | 6.40 | 4.69 | 5.25 | 5.49 | 4.38 | 4.84 | 4.83 | 5.67 |
| hsa-asg-7240 | hsa-asg-7240_st1 | 7.02 | 6.05 | 6.19 | 5.01 | 6.10 | 6.23 | 6.05 | 5.10 |
| hsa-asg-9648 | hsa-asg-9648_st1 | 6.85 | 5.93 | 5.78 | 5.21 | 5.28 | 6.17 | 5.54 | 5.30 |
| hsa-miR-487a | hsa-asg-6915_st1 | 4.98 | 4.07 | 3.58 | 3.90 | 3.38 | 3.85 | 3.72 | 3.66 |
| hsa-asg-7507 | hsa-asg-7507_st2 | 5.80 | 3.73 | 4.50 | 4.46 | 4.32 | 4.47 | 5.07 | 4.05 |
| hsa-asg-1833 | hsa-asg-1833_st1 | 5.17 | 3.64 | 4.50 | 3.04 | 4.32 | 4.38 | 3.68 | 3.91 |
| hsa-cand634 | hsa-cand634_st1 | 9.54 | 8.27 | 9.00 | 7.49 | 8.10 | 8.48 | 8.90 | 7.80 |
| hsa-asg-5507 | hsa-asg-5507_st2 | 5.51 | 3.91 | 4.98 | 3.78 | 4.06 | 3.85 | 4.60 | 4.18 |
| hsa-asg-3969 | hsa-asg-3969_st1 | 7.41 | 5.88 | 6.75 | 5.57 | 5.85 | 6.35 | 6.73 | 5.88 |
| hsa-cand471 | hsa-cand471_st1 | 9.96 | 9.36 | 9.21 | 8.23 | 8.55 | 8.85 | 9.23 | 7.92 |
| hsa-cand356 | hsa-cand356_st1 | 6.39 | 4.84 | 5.38 | 4.99 | 5.41 | 5.00 | 5.28 | 4.76 |
| hsa-asg-6876 | hsa-asg-6876_st2 | 6.52 | 4.69 | 5.41 | 5.41 | 5.28 | 5.21 | 5.31 | 5.07 |
| hsa-miR-422b | hsa-miR-422b_st2 | 11.91 | 10.62 | 10.51 | 10.71 | 11.31 | 10.68 | 10.3 | 10.94 |
| hsa-asg-14002 | hsa-asg-14002_st1 | 6.81 | 4.93 | 5.94 | 5.69 | 5.55 | 5.83 | 5.26 | 5.27 |
| hsa-asg-2864 | hsa-asg-2864_st2 | 6.54 | 5.05 | 5.77 | 4.87 | 5.47 | 5.51 | 5.39 | 5.27 |
| hsa-asg-12328 | hsa-asg-12328_st1 | 4.13 | 2.90 | 3.68 | 2.84 | 2.90 | 3.18 | 2.32 | 2.62 |
| hsa-cand753 | hsa-cand753_st1 | 6.55 | 5.55 | 5.86 | 4.93 | 5.18 | 5.39 | 5.79 | 4.62 |
| hsa-asg-9513 | hsa-asg-9513_st1 | 7.31 | 5.93 | 6.75 | 5.33 | 5.83 | 6.13 | 6.33 | 5.74 |
| hsa-asg-9021 | hsa-asg-9021_st1 | 8.96 | 7.85 | 8.35 | 7.22 | 7.57 | 8.31 | 8.01 | 7.37 |
| hsa-asg-8954 | hsa-asg-8954_st2 | 7.07 | 5.81 | 6.48 | 5.14 | 5.66 | 5.91 | 6.62 | 5.60 |
| hsa-asg-3653 | hsa-asg-3653_st2 | 7.26 | 6.60 | 6.57 | 5.62 | 5.85 | 6.07 | 6.04 | 5.60 |
| hsa-asg-739 | hsa-asg-739_st1 | 5.94 | 5.13 | 4.85 | 4.30 | 4.80 | 5.22 | 5.28 | 4.36 |
| hsa-asg-14038 | hsa-asg-14038_st1 | 8.58 | 7.85 | 7.48 | 7.36 | 7.65 | 7.43 | 7.00 | 7.34 |
| hsa-asg-8549 | hsa-asg-8549_st1 | 9.31 | 8.16 | 8.63 | 7.64 | 7.82 | 8.41 | 8.33 | 7.49 |
| hsa-asg-9209 | hsa-asg-9209_st2 | 7.51 | 6.13 | 6.97 | 5.97 | 6.34 | 6.48 | 6.84 | 5.74 |
| hsa-asg-4564 | hsa-asg-4564_st2 | 6.85 | 5.76 | 6.16 | 5.59 | 5.62 | 6.12 | 6.17 | 4.84 |
| hsa-asg-8995 | hsa-asg-8995_st1 | 8.84 | 7.45 | 8.22 | 7.19 | 7.54 | 8.09 | 8.24 | 7.14 |
| hsa-asg-2862 | hsa-asg-2862_st1 | 7.91 | 6.32 | 7.27 | 7.50 | 6.84 | 6.71 | 6.93 | 6.57 |
| hsa-asg-1233 | hsa-asg-1233_st1 | 10.13 | 9.21 | 9.51 | 8.40 | 8.78 | 9.38 | 9.42 | 8.65 |
| hsa-asg-13791 | hsa-asg-13791_st2 | 5.47 | 4.47 | 4.50 | 4.68 | 3.94 | 4.17 | 4.19 | 4.25 |
| hsa-asg-77552 | hsa-asg-7755_st2 | 5.79 | 5.31 | 4.85 | 4.54 | 4.70 | 4.76 | 4.49 | 4.80 |
| hsa-miR-379 | hsa-miR-379_st1 | 7.65 | 6.51 | 6.37 | 7.12 | 6.96 | 7.01 | 6.54 | 6.33 |
| hsa-asg-2230 | hsa-asg-2230_st2 | 6.35 | 5.47 | 6.00 | 4.96 | 4.70 | 5.27 | 5.42 | 4.80 |
| hsa-asg-2014 | hsa-asg-2014_st1 | 5.78 | 4.93 | 5.02 | 4.11 | 5.24 | 4.71 | 5.15 | 4.62 |
| hsa-asg-2284 | hsa-asg-2284_st1 | 5.67 | 4.69 | 5.32 | 4.21 | 4.17 | 4.57 | 4.96 | 4.25 |
| hsa-asg-1717 | hsa-asg-1717_st2 | 5.35 | 3.42 | 4.25 | 4.93 | 4.62 | 4.17 | 4.25 | 4.31 |
| hsa-asg-1431 | hsa-asg-1431_st2 | 6.05 | 5.24 | 5.21 | 4.93 | 5.28 | 5.17 | 4.25 | 4.80 |
| hsa-asg-8529 | hsa-asg-8529_st1 | 7.87 | 6.94 | 7.18 | 6.44 | 6.40 | 7.22 | 7.16 | 6.42 |
| hsa-asg-3722 | hsa-asg-3722_st1 | 9.94 | 9.12 | 9.51 | 9.24 | 8.61 | 8.85 | 8.99 | 8.29 |

| | LNneg | | | | | | | |
|---|---|---|---|---|---|---|---|---|
| MicroRNA | 8 | 9 | M | SD | % | ttest | log2Diff | Fold |
| hsa-miR-429 | 2.41 | 5.36 | 2.86 | 1.14 | 0 | 5.59E−04 | −6.63 | 99.1 |
| hsa-miR-375 | 4.61 | 6.37 | 4.27 | 1.82 | 0 | 1.00E−02 | −6.44 | 86.5 |
| hsa-miR-215 | 5.09 | 5.20 | 5.69 | 0.71 | 33 | 6.57E−05 | −5.64 | 49.9 |
| hsa-asg-9939 | 2.23 | 4.97 | 2.66 | 1.11 | 0 | 2.14E−03 | −5.19 | 36.5 |
| hsa-asg-7846 | 4.29 | 3.89 | 2.91 | 1.01 | 0 | 1.45E−03 | −5.07 | 33.6 |
| hsa-asg-6880 | 6.86 | 7.29 | 6.06 | 0.65 | 22 | 8.15E−05 | −5.02 | 32.4 |
| hsa-miR-200a | 4.75 | 7.76 | 5.54 | 1.15 | 67 | 3.37E−03 | −4.98 | 31.6 |
| hsa-miR-187 | 3.35 | 3.14 | 3.33 | 0.61 | 0 | 5.85E−05 | −4.96 | 31.2 |
| hsa-asg-14182 | 1.85 | 0.73 | 1.86 | 0.68 | 0 | 1.31E−04 | −4.92 | 30.2 |
| hsa-miR-200b | 7.64 | 10.4 | 7.68 | 1.27 | 100 | 6.41E−03 | −4.89 | 29.7 |
| hsa-asg-6838 | 6.95 | 7.53 | 6.30 | 0.61 | 44 | 8.12E−05 | −4.73 | 26.6 |
| hsa-asg-924 | 2.74 | 3.50 | 3.38 | 0.89 | 0 | 1.16E−03 | −4.65 | 25.0 |
| hsa-miR-141 | 3.80 | 4.51 | 4.16 | 0.69 | 0 | 3.64E−04 | −4.31 | 19.8 |
| hsa-asg-13498 | 3.46 | 3.14 | 3.34 | 1.63 | 0 | 3.64E−02 | −4.30 | 19.7 |
| hsa-asg-8330 | 4.32 | 5.90 | 4.70 | 0.87 | 11 | 1.69E−03 | −4.23 | 18.7 |
| hsa-miR206 | 4.66 | 6.05 | 4.49 | 1.09 | 22 | 7.53E−03 | −4.07 | 16.8 |
| hsa-miR-200c | 8.87 | 11.5 | 9.05 | 1.21 | 100 | 1.34E−02 | −4.04 | 16.5 |
| hsa-asg-7637 | 3.61 | 5.24 | 3.78 | 0.77 | 0 | 1.23E−03 | −3.95 | 15.5 |
| hsa-asg-12552 | 4.61 | 6.27 | 4.23 | 0.86 | 11 | 2.72E−03 | −3.88 | 14.7 |
| hsa-cand317 | 1.85 | 2.51 | 2.40 | 0.92 | 0 | 4.19E−03 | −3.83 | 14.2 |
| hsa-asg-11715 | 1.46 | 3.36 | 1.90 | 0.74 | 0 | 1.75E−03 | −3.60 | 12.1 |
| hsa-asg-6377 | 2.41 | 3.06 | 2.67 | 0.66 | 0 | 9.16E−04 | −3.58 | 12.0 |
| hsa-asg-3595 | 3.88 | 5.16 | 3.26 | 1.09 | 0 | 1.44E−02 | −3.56 | 11.8 |
| hsa-miR-605 | 3.03 | 4.44 | 2.52 | 1.03 | 0 | 1.15E−02 | −3.55 | 11.7 |
| hsa-asg-9262 | 4.08 | 4.48 | 4.46 | 0.58 | 0 | 4.31E−04 | −3.49 | 11.2 |
| hsa-asg-11612 | 5.25 | 6.01 | 5.07 | 0.51 | 11 | 2.06E−04 | −3.45 | 11.0 |
| hsa-miR-194 | 8.20 | 9.03 | 8.93 | 0.53 | 100 | 2.85E−04 | −3.41 | 10.6 |
| hsa-miR-802 | 3.03 | 1.60 | 1.71 | 0.65 | 0 | 1.21E−03 | −3.37 | 10.3 |
| hsa-miR-802 | 2.58 | 1.83 | 2.10 | 0.82 | 0 | 7.93E−03 | −3.05 | 8.3 |
| hsa-asg-6027 | 10.1 | 10.1 | 8.75 | 0.89 | 44 | 7.13E−03 | −3.35 | 10.2 |
| hsa-asg-4691 | 5.90 | 6.63 | 5.90 | 0.52 | 22 | 3.01E−04 | −3.34 | 10.1 |
| hsa-miR-31 | 8.66 | 10.0 | 9.21 | 0.92 | 100 | 9.06E−03 | −3.30 | 9.9 |
| hsa-asg-3667 | 2.41 | 4.13 | 2.67 | 0.64 | 0 | 1.25E−03 | −3.30 | 9.8 |
| hsa-asg-12983 | 3.03 | 3.62 | 2.56 | 1.00 | 0 | 1.50E−02 | −3.26 | 9.6 |
| hsa-asg-3046 | 5.36 | 5.84 | 5.62 | 0.54 | 78 | 4.18E−04 | −3.26 | 9.6 |
| hsa-asg-9082 | 3.56 | 2.80 | 2.99 | 0.89 | 0 | 8.96E−03 | −3.23 | 9.4 |
| hsa-cand601 | 3.40 | 2.89 | 2.98 | 0.86 | 0 | 7.45E−03 | −3.22 | 9.3 |
| hsa-asg-13298 | 5.48 | 6.20 | 5.72 | 0.50 | 44 | 3.06E−04 | −3.19 | 9.1 |
| hsa-miR-200a* | 3.17 | 2.89 | 2.72 | 0.64 | 0 | 1.64E−03 | −3.16 | 8.9 |
| hsa-asg-2154 | 3.29 | 3.22 | 2.24 | 0.94 | 0 | 1.32E−02 | −3.15 | 8.9 |
| hsa-asg-12799 | 4.29 | 4.84 | 4.19 | 0.87 | 0 | 1.15E−02 | −3.00 | 8.0 |
| hsa-asg-13705 | 3.17 | 3.22 | 2.27 | 1.11 | 0 | 3.46E−02 | −2.97 | 7.8 |
| hsa-asg-11160 | 3.51 | 5.11 | 3.21 | 0.79 | 0 | 7.52E−03 | −2.95 | 7.7 |
| hsa-asg-12058 | 3.88 | 1.60 | 2.38 | 0.94 | 0 | 1.96E−02 | −2.89 | 7.4 |
| hsa-asg-10481 | 2.89 | 4.29 | 3.29 | 0.73 | 0 | 5.72E−03 | −2.87 | 7.3 |
| hsa-miR-192 | 8.79 | 9.63 | 9.64 | 0.67 | 100 | 3.84E−03 | −2.85 | 7.2 |
| hsa-asg-11410 | 2.23 | 2.89 | 2.53 | 0.78 | 0 | 8.86E−03 | −2.84 | 7.2 |
| hsa-asg-11320 | 3.97 | 4.21 | 4.22 | 0.31 | 0 | 2.66E−05 | −2.82 | 7.0 |
| hsa-asg-10131 | 3.17 | 5.07 | 3.22 | 0.79 | 0 | 9.48E−03 | −2.82 | 7.0 |
| hsa-asg-12139 | 2.05 | 3.50 | 2.32 | 0.59 | 0 | 1.96E−03 | −2.80 | 7.0 |
| hsa-asg-11926 | 4.25 | 3.22 | 2.55 | 0.95 | 0 | 2.36E−02 | −2.79 | 6.9 |
| hsa-asg-13030 | 5.05 | 4.13 | 4.30 | 0.51 | 0 | 8.82E−04 | −2.76 | 6.8 |
| hsa-asg-5986 | 7.41 | 8.39 | 7.18 | 0.75 | 0 | 9.04E−03 | −2.72 | 6.6 |
| hsa-cand899 | 4.22 | 5.09 | 4.04 | 0.78 | 0 | 1.08E−02 | −2.71 | 6.5 |
| hsa-asg-5119 | 2.58 | 3.62 | 2.49 | 0.55 | 0 | 1.71E−03 | −2.70 | 6.5 |
| hsa-asg-7095 | 6.02 | 6.41 | 5.49 | 0.51 | 22 | 1.05E−03 | −2.68 | 6.4 |
| hsa-asg-4219 | 2.74 | 3.94 | 2.43 | 0.87 | 0 | 1.98E−02 | −2.67 | 6.4 |
| hsa-asg-4066 | 3.61 | 5.40 | 3.63 | 1.06 | 0 | 4.44E−02 | −2.66 | 6.3 |
| hsa-miR-9 | 1.66 | 3.62 | 2.79 | 0.63 | 0 | 3.86E−03 | −2.65 | 6.3 |
| hsa-miR-9 | 3.29 | 4.13 | 3.29 | 0.55 | 0 | 2.02E−03 | −2.60 | 6.1 |
| hsa-asg-8239 | 3.29 | 4.13 | 3.22 | 0.68 | 0 | 6.31E−03 | −2.64 | 6.3 |
| hsa-asg-10411 | 3.71 | 2.07 | 3.20 | 0.84 | 0 | 1.77E−02 | −2.64 | 6.2 |
| hsa-asg-4015 | 5.47 | 5.45 | 5.21 | 0.92 | 0 | 2.67E−02 | −2.62 | 6.1 |
| hsa-asg-3036 | 4.73 | 4.67 | 3.65 | 0.96 | 0 | 3.32E−02 | −2.61 | 6.1 |
| hsa-asg-1260 | 2.41 | 1.60 | 2.60 | 0.48 | 0 | 8.69E−04 | −2.61 | 6.1 |
| hsa-asg-7262 | 5.82 | 6.05 | 5.50 | 0.59 | 56 | 3.13E−03 | −2.60 | 6.1 |
| hsa-cand830 | 3.17 | 3.50 | 2.85 | 0.81 | 0 | 1.69E−02 | −2.57 | 5.9 |
| hsa-asg-9752 | 5.57 | 5.28 | 4.63 | 0.52 | 0 | 1.50E−03 | −2.57 | 5.9 |
| hsa-asg-7014 | 3.93 | 4.08 | 3.78 | 0.97 | 0 | 3.74E−02 | −2.55 | 5.9 |
| hsa-asg-2551 | 5.32 | 6.57 | 5.06 | 1.01 | 11 | 4.38E−02 | −2.54 | 5.8 |
| hsa-asg-4870 | 4.63 | 4.41 | 3.91 | 0.94 | 0 | 3.38E−02 | −2.53 | 5.8 |
| hsa-asg-4685 | 4.32 | 4.76 | 3.82 | 0.65 | 0 | 6.26E−03 | −2.53 | 5.8 |
| hsa-asg-6071 | 4.38 | 4.13 | 3.58 | 0.70 | 0 | 9.42E−03 | −2.50 | 5.7 |
| hsa-asg-3521 | 2.74 | 2.89 | 2.42 | 0.79 | 0 | 1.72E−02 | −2.50 | 5.7 |
| hsa-asg-12755 | 3.61 | 5.57 | 4.13 | 0.95 | 22 | 3.66E−02 | −2.50 | 5.6 |
| hsa-asg-12625 | 3.46 | 3.29 | 3.79 | 0.67 | 0 | 8.12E−03 | −2.46 | 5.5 |
| hsa-asg-2738 | 5.07 | 6.36 | 5.24 | 0.74 | 33 | 1.36E−02 | −2.46 | 5.5 |
| hsa-asg-12941 | 8.99 | 7.44 | 8.21 | 0.68 | 100 | 9.49E−03 | −2.43 | 5.4 |
| hsa-miR-381 | 1.28 | 3.22 | 3.08 | 0.91 | 0 | 3.68E−02 | −2.41 | 5.3 |
| hsa-asg-12590 | 3.80 | 3.36 | 3.25 | 0.78 | 0 | 1.90E−02 | −2.41 | 5.3 |
| hsa-asg-6773 | 2.23 | 2.51 | 2.64 | 0.64 | 0 | 7.55E−03 | −2.41 | 5.3 |
| hsa-asg-13797 | 4.55 | 4.13 | 3.37 | 0.67 | 0 | 9.49E−03 | −2.41 | 5.3 |
| hsa-asg-8922 | 7.54 | 7.77 | 7.26 | 0.77 | 100 | 1.89E−02 | −2.39 | 5.3 |
| hsa-asg-1689 | 5.32 | 5.77 | 5.41 | 0.36 | 11 | 2.32E−04 | −2.39 | 5.2 |
| hsa-asg-11219 | 2.58 | 4.92 | 3.51 | 0.97 | 0 | 4.99E−02 | −2.36 | 5.2 |
| hsa-asg-13450 | 3.71 | 3.22 | 2.84 | 0.77 | 0 | 2.00E−02 | −2.36 | 5.1 |
| hsa-asg-12365 | 5.43 | 5.97 | 5.11 | 0.86 | 22 | 3.21E−02 | −2.36 | 5.1 |
| hsa-asg-933 | 8.21 | 7.68 | 7.23 | 0.57 | 0 | 4.53E−03 | −2.35 | 5.1 |
| hsa-asg-8174 | 2.74 | 4.13 | 3.21 | 0.53 | 0 | 3.02E−03 | −2.34 | 5.1 |
| hsa-asg-9574 | 6.54 | 6.00 | 5.84 | 0.77 | 44 | 2.01E−02 | −2.34 | 5.1 |
| hsa-asg-8397 | 3.51 | 4.70 | 3.62 | 0.90 | 0 | 3.90E−02 | −2.34 | 5.1 |
| hsa-asg-9319 | 4.97 | 5.79 | 4.52 | 0.76 | 0 | 1.99E−02 | −2.32 | 5.0 |
| hsa-asg-4080 | 3.29 | 3.06 | 2.83 | 0.74 | 0 | 1.77E−02 | −2.31 | 5.0 |
| hsa-asg-3900 | 3.17 | 0.73 | 2.83 | 0.83 | 0 | 2.95E−02 | −2.30 | 4.9 |
| hsa-asg-11056 | 2.41 | 5.07 | 3.35 | 0.87 | 0 | 3.59E−02 | −2.30 | 4.9 |
| hsa-asg-4915 | 2.05 | 4.44 | 2.96 | 0.81 | 0 | 2.73E−02 | −2.30 | 4.9 |
| hsa-asg-6500 | 5.09 | 5.47 | 4.77 | 0.59 | 0 | 6.37E−03 | −2.28 | 4.9 |
| hsa-asg-3716 | 5.78 | 5.56 | 5.11 | 0.76 | 0 | 2.20E−02 | −2.28 | 4.8 |
| hsa-asg-1351 | 4.44 | 4.92 | 4.00 | 0.76 | 11 | 2.14E−02 | −2.27 | 4.8 |
| hsa-asg-7385 | 5.63 | 5.59 | 5.34 | 0.35 | 22 | 2.64E−04 | −2.27 | 4.8 |
| hsa-asg-9879 | 3.40 | 3.06 | 3.19 | 0.63 | 0 | 9.53E−03 | −2.25 | 4.8 |
| hsa-asg-6381 | 3.40 | 4.64 | 3.85 | 0.76 | 0 | 2.31E−02 | −2.25 | 4.7 |
| hsa-miR-124a | 3.40 | 4.82 | 3.54 | 0.87 | 0 | 4.14E−02 | −2.23 | 4.7 |
| hsa-asg-8986 | 5.22 | 6.22 | 5.00 | 0.75 | 0 | 2.26E−02 | −2.23 | 4.7 |
| hsa-asg-10457 | 4.04 | 4.64 | 3.61 | 0.85 | 0 | 3.92E−02 | −2.22 | 4.7 |
| hsa-asg-11656 | 4.82 | 5.04 | 4.66 | 0.43 | 0 | 1.17E−03 | −2.20 | 4.6 |
| hsa-asg-9573 | 2.74 | 4.13 | 3.02 | 0.61 | 0 | 9.37E−03 | −2.20 | 4.6 |
| hsa-asg-8602 | 5.83 | 6.38 | 5.57 | 0.61 | 11 | 8.90E−03 | −2.19 | 4.6 |
| hsa-asg-3061 | 6.20 | 5.54 | 5.47 | 0.54 | 33 | 5.08E−03 | −2.19 | 4.6 |
| hsa-asg-6135 | 2.41 | 5.16 | 4.13 | 0.83 | 0 | 3.60E−02 | −2.19 | 4.6 |
| hsa-asg-8972 | 3.17 | 4.13 | 3.04 | 0.86 | 0 | 4.24E−02 | −2.19 | 4.5 |
| hsa-asg-8703 | 3.71 | 4.70 | 3.36 | 0.80 | 0 | 3.24E−02 | −2.18 | 4.5 |
| hsa-asg-8522 | 4.75 | 4.76 | 4.33 | 0.47 | 0 | 2.17E−03 | −2.18 | 4.5 |
| hsa-asg-6116 | 2.74 | 1.83 | 2.45 | 0.54 | 0 | 5.24E−03 | −2.18 | 4.5 |
| hsa-asg-9781 | 5.46 | 6.18 | 5.06 | 0.76 | 11 | 2.68E−02 | −2.17 | 4.5 |
| hsa-asg-1727 | 5.11 | 5.68 | 4.97 | 0.77 | 11 | 2.77E−02 | −2.17 | 4.5 |
| hsa-asg-2894 | 3.61 | 4.13 | 3.21 | 0.74 | 0 | 2.36E−02 | −2.16 | 4.5 |
| hsa-asg-12922 | 4.75 | 4.92 | 4.43 | 0.53 | 0 | 4.92E−03 | −2.16 | 4.5 |
| hsa-asg-1715 | 3.40 | 3.06 | 3.25 | 0.58 | 0 | 7.66E−03 | −2.15 | 4.4 |
| hsa-asg-10580 | 7.76 | 9.33 | 8.19 | 0.62 | 100 | 1.10E−02 | −2.15 | 4.4 |
| hsa-asg-7183 | 3.61 | 4.37 | 3.71 | 0.50 | 0 | 3.73E−03 | −2.14 | 4.4 |
| hsa-asg-11797 | 5.47 | 6.15 | 5.47 | 0.83 | 33 | 3.99E−02 | −2.13 | 4.4 |
| hsa-asg-13091 | 6.30 | 7.24 | 6.25 | 0.83 | 78 | 4.17E−02 | −2.13 | 4.4 |
| hsa-asg-12684 | 8.14 | 8.25 | 7.97 | 0.32 | 100 | 2.46E−04 | −2.12 | 4.4 |
| hsa-asg-3841 | 7.20 | 6.93 | 6.48 | 0.54 | 89 | 5.74E−03 | −2.12 | 4.3 |
| hsa-asg-7228 | 4.35 | 5.59 | 5.22 | 0.76 | 0 | 3.06E−02 | −2.11 | 4.3 |
| hsa-asg-8643 | 5.40 | 4.58 | 4.87 | 0.62 | 0 | 1.19E−02 | −2.11 | 4.3 |
| hsa-asg-1296 | 3.88 | 4.13 | 3.24 | 0.85 | 0 | 4.71E−02 | −2.11 | 4.3 |
| hsa-asg-5662 | 3.66 | 5.09 | 4.39 | 0.81 | 11 | 4.04E−02 | −2.10 | 4.3 |
| hsa-asg-6614 | 4.32 | 5.40 | 4.32 | 0.85 | 0 | 4.85E−02 | −2.09 | 4.2 |
| hsa-asg-12119 | 3.71 | 5.44 | 4.29 | 0.62 | 11 | 1.32E−02 | −2.09 | 4.2 |
| hsa-asg-9053 | 5.90 | 5.62 | 5.85 | 0.69 | 33 | 2.07E−02 | −2.08 | 4.2 |
| hsa-asg-9270 | 2.74 | 3.06 | 2.79 | 0.74 | 0 | 2.82E−02 | −2.08 | 4.2 |
| hsa-cand894 | 3.80 | 3.73 | 3.43 | 0.70 | 0 | 2.32E−02 | −2.08 | 4.2 |
| hsa-asg-1513 | 4.53 | 5.04 | 4.73 | 0.72 | 0 | 2.62E−02 | −2.07 | 4.2 |
| hsa-asg-191 | 3.17 | 4.82 | 3.71 | 0.58 | 0 | 9.73E−03 | −2.06 | 4.2 |
| hsa-asg-3815 | 5.01 | 5.61 | 4.51 | 0.81 | 0 | 4.28E−02 | −2.06 | 4.2 |
| hsa-asg-10181 | 5.13 | 5.79 | 5.20 | 0.62 | 11 | 1.37E−02 | −2.05 | 4.1 |
| hsa-asg-12697 | 4.04 | 4.04 | 3.92 | 0.34 | 0 | 4.41E−04 | −2.04 | 4.1 |
| hsa-asg-6269 | 6.39 | 6.48 | 5.41 | 0.82 | 33 | 4.59E−02 | −2.04 | 4.1 |
| hsa-asg-10114 | 3.40 | 3.06 | 4.12 | 0.73 | 0 | 2.87E−02 | −2.04 | 4.1 |
| hsa-asg-10399 | 3.88 | 4.21 | 3.95 | 0.42 | 0 | 1.74E−03 | −2.03 | 4.1 |
| hsa-asg-13266 | 2.89 | 3.22 | 3.14 | 0.58 | 0 | 1.01E−02 | −2.03 | 4.1 |
| hsa-asg-6000 | 5.25 | 5.30 | 4.90 | 0.53 | 11 | 6.51E−03 | −2.03 | 4.1 |
| hsa-asg-7166 | 3.17 | 4.37 | 3.29 | 0.56 | 0 | 8.68E−03 | −2.03 | 4.1 |
| hsa-asg-466 | 5.28 | 5.09 | 4.59 | 0.79 | 0 | 4.24E−02 | −2.02 | 4.1 |
| hsa-asg-6934 | 3.40 | 3.22 | 3.14 | 0.70 | 0 | 2.61E−02 | −2.02 | 4.0 |
| hsa-asg-265 | 5.77 | 5.36 | 5.97 | 0.74 | 44 | 3.24E−02 | −2.01 | 4.0 |
| hsa-asg-13334 | 2.89 | 2.71 | 2.99 | 0.41 | 0 | 1.57E−03 | −2.01 | 4.0 |
| hsa-asg-5712 | 6.82 | 7.18 | 6.23 | 0.56 | 67 | 9.55E−03 | −2.01 | 4.0 |
| hsa-asg-4829 | 9.60 | 10.6 | 9.16 | 0.82 | 89 | 4.98E−02 | −2.00 | 4.0 |
| hsa-asg-1596 | 4.19 | 4.37 | 4.20 | 0.49 | 0 | 4.65E−03 | −2.00 | 4.0 |
| hsa-asg-7278 | 4.73 | 5.42 | 5.02 | 0.58 | 11 | 1.12E−02 | −2.00 | 4.0 |
| hsa-miR-202 | 5.46 | 4.82 | 4.84 | 0.57 | 0 | 1.08E−02 | −2.00 | 4.0 |
| hsa-asg-244 | 4.68 | 5.49 | 4.63 | 0.66 | 0 | 2.13E−02 | −1.98 | 4.0 |
| hsa-asg-3614 | 4.73 | 4.61 | 4.49 | 0.59 | 0 | 1.30E−02 | −1.98 | 4.0 |
| hsa-asg-3289 | 3.17 | 3.94 | 3.49 | 0.56 | 0 | 9.64E−03 | −1.98 | 4.0 |
| hsa-asg-11361 | 2.58 | 4.29 | 3.39 | 0.52 | 0 | 6.76E−03 | −1.98 | 3.9 |
| hsa-asg-8953 | 8.34 | 8.97 | 7.81 | 0.76 | 100 | 3.94E−02 | −1.97 | 3.9 |
| hsa-asg-572 | 4.58 | 5.34 | 4.44 | 0.74 | 0 | 3.46E−02 | −1.97 | 3.9 |
| hsa-asg-11796 | 5.70 | 5.97 | 5.43 | 0.48 | 11 | 4.84E−03 | −1.97 | 3.9 |
| hsa-cand630 | 5.03 | 5.26 | 5.08 | 0.66 | 0 | 2.25E−02 | −1.97 | 3.9 |
| hsa-asg-9085 | 5.58 | 6.11 | 5.50 | 0.78 | 11 | 4.48E−02 | −1.97 | 3.9 |
| hsa-asg-3150 | 5.87 | 5.59 | 6.15 | 0.62 | 56 | 1.69E−02 | −1.96 | 3.9 |
| hsa-asg-6734 | 2.58 | 3.22 | 2.86 | 0.61 | 0 | 1.66E−02 | −1.96 | 3.9 |
| hsa-asg-1010 | 4.75 | 4.70 | 4.71 | 0.69 | 11 | 2.73E−02 | −1.95 | 3.9 |
| hsa-asg-7067 | 4.44 | 5.07 | 4.48 | 0.62 | 11 | 1.70E−02 | −1.95 | 3.9 |
| hsa-asg-11875 | 4.19 | 4.92 | 3.87 | 0.74 | 0 | 3.64E−02 | −1.95 | 3.9 |
| hsa-asg-9320 | 4.80 | 5.28 | 4.79 | 0.60 | 11 | 1.51E−02 | −1.95 | 3.9 |
| hsa-asg-9873 | 3.51 | 3.36 | 2.95 | 0.71 | 0 | 3.08E−02 | −1.94 | 3.9 |
| hsa-asg-5115 | 7.52 | 7.44 | 7.15 | 0.52 | 100 | 7.57E−03 | −1.94 | 3.8 |
| hsa-asg-12556 | 7.29 | 6.90 | 7.66 | 0.76 | 78 | 4.16E−02 | −1.93 | 3.8 |
| hsa-asg-807 | 4.97 | 5.54 | 4.86 | 0.52 | 11 | 8.15E−03 | −1.93 | 3.8 |
| hsa-asg-9025 | 6.05 | 6.16 | 5.22 | 0.62 | 11 | 1.80E−02 | −1.92 | 3.8 |
| hsa-asg-12652 | 2.23 | 3.22 | 2.80 | 0.63 | 0 | 2.08E−02 | −1.92 | 3.8 |
| hsa-asg-9547 | 4.25 | 5.32 | 3.97 | 0.72 | 0 | 3.48E−02 | −1.92 | 3.8 |
| hsa-asg-5385 | 5.66 | 5.86 | 5.80 | 0.40 | 33 | 1.93E−03 | −1.92 | 3.8 |
| hsa-asg-13661 | 5.28 | 5.26 | 5.03 | 0.70 | 0 | 3.25E−02 | −1.92 | 3.8 |
| hsa-asg-7178 | 5.83 | 5.62 | 5.06 | 0.75 | 0 | 4.15E−02 | −1.91 | 3.8 |
| hsa-cand173 | 6.12 | 5.56 | 6.08 | 0.65 | 56 | 2.35E−02 | −1.91 | 3.8 |
| hsa-asg-1981 | 3.40 | 4.37 | 3.59 | 0.63 | 0 | 2.02E−02 | −1.91 | 3.7 |
| hsa-asg-477 | 5.30 | 6.44 | 5.18 | 0.73 | 22 | 3.83E−02 | −1.90 | 3.7 |
| hsa-asg-11742 | 4.25 | 4.51 | 3.90 | 0.76 | 0 | 4.52E−02 | −1.89 | 3.7 |
| hsa-asg-7776 | 4.53 | 4.73 | 4.59 | 0.61 | 0 | 1.90E−02 | −1.89 | 3.7 |
| hsa-asg-7215 | 5.40 | 4.97 | 5.32 | 0.47 | 11 | 4.99E−03 | −1.89 | 3.7 |
| hsa-asg-4814 | 6.42 | 6.22 | 6.24 | 0.58 | 78 | 1.49E−02 | −1.89 | 3.7 |
| hsa-asg-9163 | 4.38 | 4.29 | 3.86 | 0.71 | 0 | 3.49E−02 | −1.89 | 3.7 |
| hsa-asg-9453 | 6.75 | 5.76 | 6.94 | 0.77 | 33 | 4.91E−02 | −1.88 | 3.7 |
| hsa-asg-8404 | 3.40 | 4.58 | 3.60 | 0.70 | 0 | 3.46E−02 | −1.88 | 3.7 |
| hsa-asg-8926 | 5.55 | 5.22 | 5.00 | 0.47 | 0 | 5.40E−03 | −1.88 | 3.7 |
| hsa-asg-10962 | 3.03 | 4.51 | 3.35 | 0.71 | 0 | 3.64E−02 | −1.88 | 3.7 |
| hsa-asg-225 | 5.76 | 5.22 | 5.57 | 0.48 | 22 | 6.28E−03 | −1.88 | 3.7 |
| hsa-asg-8512 | 4.32 | 4.44 | 4.02 | 0.46 | 0 | 5.12E−03 | −1.87 | 3.7 |
| hsa-asg-6941 | 4.55 | 5.44 | 4.44 | 0.64 | 0 | 2.40E−02 | −1.87 | 3.7 |
| hsa-asg-956 | 2.58 | 3.36 | 2.94 | 0.50 | 0 | 7.86E−03 | −1.87 | 3.7 |
| hsa-asg-7344 | 4.55 | 5.11 | 4.46 | 0.47 | 0 | 5.22E−03 | −1.87 | 3.6 |
| hsa-cand624 | 7.30 | 7.60 | 6.83 | 0.71 | 78 | 3.74E−02 | −1.86 | 3.6 |
| hsa-asg-12925 | 7.72 | 6.68 | 7.44 | 0.67 | 100 | 3.02E−02 | −1.86 | 3.6 |
| hsa-asg-12989 | 2.89 | 4.92 | 3.66 | 0.71 | 0 | 3.86E−02 | −1.86 | 3.6 |
| hsa-asg-6618 | 5.18 | 5.22 | 5.37 | 0.49 | 22 | 7.23E−03 | −1.86 | 3.6 |
| hsa-asg-3296 | 4.50 | 4.58 | 4.17 | 0.65 | 0 | 2.76E−02 | −1.85 | 3.6 |
| hsa-asg-3003 | 4.25 | 4.58 | 4.00 | 0.75 | 0 | 4.77E−02 | −1.84 | 3.6 |
| hsa-asg-3155 | 5.54 | 5.47 | 5.35 | 0.28 | 44 | 2.37E−04 | −1.84 | 3.6 |
| hsa-miR-7 | 8.56 | 8.46 | 8.60 | 0.64 | 100 | 2.57E−02 | −1.84 | 3.6 |
| hsa-asg-6792 | 6.08 | 6.50 | 6.06 | 0.63 | 44 | 2.36E−02 | −1.84 | 3.6 |
| hsa-asg-12395 | 5.41 | 5.77 | 5.64 | 0.64 | 44 | 2.54E−02 | −1.84 | 3.6 |
| hsa-asg-2045 | 6.78 | 7.28 | 6.40 | 0.65 | 89 | 2.85E−02 | −1.83 | 3.6 |
| hsa-asg-3745 | 6.75 | 6.61 | 6.27 | 0.59 | 11 | 1.91E−02 | −1.83 | 3.6 |
| hsa-miR189 | 4.35 | 4.54 | 4.57 | 0.59 | 11 | 1.81E−02 | −1.83 | 3.6 |
| hsa-asg-4767 | 5.03 | 5.26 | 4.63 | 0.57 | 0 | 1.67E−02 | −1.82 | 3.5 |
| hsa-asg-9849 | 6.55 | 7.02 | 6.68 | 0.74 | 89 | 5.00E−02 | −1.81 | 3.5 |
| hsa-asg-394 | 4.61 | 3.36 | 3.62 | 0.57 | 0 | 1.64E−02 | −1.80 | 3.5 |
| hsa-asg-4061 | 7.34 | 7.49 | 6.89 | 0.69 | 78 | 3.81E−02 | −1.80 | 3.5 |
| hsa-asg-8931 | 4.71 | 4.82 | 4.47 | 0.35 | 0 | 1.30E−03 | −1.80 | 3.5 |
| hsa-asg-4055 | 4.38 | 3.22 | 3.48 | 0.54 | 0 | 1.35E−02 | −1.80 | 3.5 |
| hsa-asg-6866 | 3.88 | 4.13 | 3.34 | 0.66 | 0 | 3.16E−02 | −1.80 | 3.5 |
| hsa-asg-10802 | 4.85 | 4.58 | 4.33 | 0.56 | 0 | 1.61E−02 | −1.80 | 3.5 |
| hsa-asg-13197 | 3.03 | 3.50 | 2.87 | 0.47 | 0 | 6.60E−03 | −1.79 | 3.5 |
| hsa-asg-4964 | 5.30 | 5.76 | 4.84 | 0.69 | 0 | 3.96E−02 | −1.79 | 3.5 |
| hsa-asg-242 | 5.05 | 5.02 | 4.65 | 0.53 | 0 | 1.25E−02 | −1.78 | 3.4 |
| hsa-asg-4693 | 5.65 | 5.54 | 5.14 | 0.51 | 11 | 1.11E−02 | −1.78 | 3.4 |
| hsa-asg-1127 | 2.41 | 3.73 | 3.54 | 0.54 | 0 | 1.43E−02 | −1.78 | 3.4 |
| hsa-asg-1172 | 4.50 | 3.62 | 4.65 | 0.71 | 0 | 4.50E−02 | −1.78 | 3.4 |
| hsa-asg-12214 | 4.87 | 5.65 | 4.76 | 0.57 | 0 | 1.83E−02 | −1.77 | 3.4 |
| hsa-asg-1241 | 7.30 | 8.09 | 7.09 | 0.70 | 22 | 4.35E−02 | −1.76 | 3.4 |
| hsa-asg-10832 | 5.09 | 4.70 | 4.30 | 0.57 | 0 | 1.88E−02 | −1.76 | 3.4 |
| hsa-cand668 | 8.50 | 8.59 | 7.63 | 0.65 | 100 | 3.23E−02 | −1.76 | 3.4 |
| hsa-asg-7900 | 5.44 | 5.83 | 5.11 | 0.72 | 0 | 4.99E−02 | −1.76 | 3.4 |
| hsa-miR-518c* | 3.71 | 4.64 | 4.02 | 0.65 | 0 | 3.46E−02 | −1.75 | 3.4 |
| hsa-asg-1576 | 7.43 | 7.63 | 7.51 | 0.46 | 100 | 6.83E−03 | −1.75 | 3.4 |
| hsa-asg-3109 | 3.40 | 3.73 | 3.85 | 0.70 | 0 | 4.59E−02 | −1.75 | 3.4 |
| hsa-asg-3771 | 4.75 | 4.04 | 4.30 | 0.53 | 0 | 1.43E−02 | −1.75 | 3.4 |
| hsa-asg-4440 | 4.68 | 4.95 | 5.46 | 0.51 | 22 | 1.18E−02 | −1.74 | 3.3 |
| hsa-asg-7671 | 6.17 | 5.30 | 6.26 | 0.67 | 78 | 4.03E−02 | −1.73 | 3.3 |
| hsa-asg-11795 | 5.75 | 4.82 | 5.44 | 0.59 | 22 | 2.30E−02 | −1.73 | 3.3 |
| hsa-asg-8731 | 5.36 | 4.76 | 4.45 | 0.52 | 0 | 1.31E−02 | −1.73 | 3.3 |
| hsa-asg-10510 | 4.32 | 4.76 | 3.87 | 0.61 | 0 | 2.74E−02 | −1.73 | 3.3 |
| hsa-asg-3744 | 5.46 | 4.64 | 4.87 | 0.71 | 11 | 4.93E−02 | −1.72 | 3.3 |
| hsa-asg-1716 | 5.53 | 5.42 | 4.83 | 0.52 | 0 | 1.45E−02 | −1.71 | 3.3 |
| hsa-asg-4703 | 5.23 | 4.70 | 5.24 | 0.55 | 22 | 1.86E−02 | −1.71 | 3.3 |
| hsa-asg-13135 | 4.44 | 5.57 | 5.11 | 0.44 | 22 | 6.03E−03 | −1.70 | 3.3 |
| hsa-asg-5326 | 6.55 | 5.32 | 6.29 | 0.63 | 67 | 3.39E−02 | −1.70 | 3.3 |
| hsa-asg-11898 | 4.93 | 5.36 | 4.72 | 0.54 | 11 | 1.78E−02 | −1.70 | 3.2 |
| hsa-miR-565 | 7.88 | 7.17 | 7.24 | 0.66 | 56 | 4.21E−02 | −1.69 | 3.2 |
| hsa-asg-7224 | 6.69 | 6.78 | 6.86 | 0.67 | 89 | 4.32E−02 | −1.69 | 3.2 |
| hsa-asg-3970 | 3.29 | 3.73 | 2.80 | 0.67 | 0 | 4.29E−02 | −1.69 | 3.2 |
| hsa-asg-9334 | 6.60 | 6.85 | 6.71 | 0.50 | 89 | 1.26E−02 | −1.69 | 3.2 |
| hsa-asg-92 | 4.19 | 5.11 | 4.48 | 0.61 | 11 | 3.04E−02 | −1.68 | 3.2 |
| hsa-asg-7174 | 6.63 | 6.39 | 6.06 | 0.64 | 44 | 3.84E−02 | −1.67 | 3.2 |
| hsa-asg-7133 | 5.83 | 6.77 | 5.69 | 0.66 | 33 | 4.23E−02 | −1.67 | 3.2 |
| hsa-asg-7023 | 4.85 | 4.29 | 4.36 | 0.26 | 0 | 2.94E−04 | −1.66 | 3.2 |
| hsa-asg-11096 | 6.64 | 7.22 | 6.59 | 0.62 | 89 | 3.50E−02 | −1.66 | 3.2 |
| hsa-asg-3998 | 8.74 | 8.47 | 8.75 | 0.35 | 100 | 1.97E−03 | −1.66 | 3.2 |
| hsa-asg-9629 | 4.75 | 5.16 | 4.77 | 0.46 | 0 | 8.93E−03 | −1.65 | 3.1 |
| hsa-miR-9* | 4.71 | 5.20 | 5.55 | 0.53 | 44 | 1.92E−02 | −1.65 | 3.1 |
| hsa-asg-8948 | 4.32 | 4.44 | 4.04 | 0.67 | 0 | 4.78E−02 | −1.65 | 3.1 |
| hsa-asg-13598 | 5.47 | 5.38 | 5.55 | 0.66 | 22 | 4.51E−02 | −1.64 | 3.1 |
| hsa-asg-7131 | 7.49 | 7.39 | 6.93 | 0.48 | 33 | 1.17E−02 | −1.64 | 3.1 |
| hsa-cand960 | 4.63 | 4.41 | 4.87 | 0.47 | 11 | 1.12E−02 | −1.63 | 3.1 |
| hsa-asg-2237 | 4.19 | 4.70 | 4.38 | 0.40 | 0 | 4.61E−03 | −1.63 | 3.1 |
| hsa-asg-10426 | 5.48 | 5.16 | 5.09 | 0.61 | 44 | 3.49E−02 | −1.63 | 3.1 |
| hsa-asg-1591 | 4.44 | 5.64 | 4.75 | 0.53 | 11 | 1.93E−02 | −1.63 | 3.1 |
| hsa-asg-2042 | 6.07 | 5.87 | 5.27 | 0.57 | 22 | 2.75E−02 | −1.62 | 3.1 |
| hsa-asg-1815 | 6.20 | 6.31 | 6.18 | 0.63 | 78 | 3.97E−02 | −1.62 | 3.1 |
| hsa-asg-2342 | 7.03 | 7.34 | 6.96 | 0.56 | 89 | 2.45E−02 | −1.62 | 3.1 |
| hsa-asg-13316 | 5.23 | 5.07 | 4.80 | 0.64 | 11 | 4.24E−02 | −1.62 | 3.1 |
| hsa-asg-4007 | 4.44 | 3.50 | 3.80 | 0.50 | 0 | 1.63E−02 | −1.61 | 3.1 |
| hsa-asg-999 | 4.89 | 5.20 | 4.65 | 0.42 | 0 | 7.01E−03 | −1.61 | 3.0 |
| hsa-asg-18 | 5.35 | 4.61 | 5.16 | 0.58 | 22 | 3.05E−02 | −1.61 | 3.0 |
| hsa-asg-2542 | 5.28 | 5.30 | 4.87 | 0.50 | 0 | 1.58E−02 | −1.60 | 3.0 |
| hsa-asg-8636 | 6.60 | 6.45 | 6.14 | 0.54 | 67 | 2.24E−02 | −1.60 | 3.0 |
| hsa-asg-11900 | 6.22 | 5.36 | 5.69 | 0.45 | 56 | 9.41E−03 | −1.59 | 3.0 |
| hsa-asg-8617 | 9.05 | 9.78 | 8.72 | 0.64 | 100 | 4.69E−02 | −1.59 | 3.0 |
| hsa-asg-8188 | 7.08 | 6.98 | 7.01 | 0.56 | 89 | 2.68E−02 | −1.59 | 3.0 |
| hsa-asg-3587 | 4.35 | 4.61 | 4.94 | 0.54 | 0 | 2.35E−02 | −1.59 | 3.0 |
| hsa-asg-12814 | 3.17 | 3.36 | 3.64 | 0.63 | 0 | 4.42E−02 | −1.58 | 3.0 |
| hsa-asg-12146 | 5.35 | 6.22 | 5.52 | 0.46 | 33 | 1.12E−02 | −1.58 | 3.0 |
| hsa-asg-2318 | 6.64 | 6.93 | 6.69 | 0.51 | 100 | 1.85E−02 | −1.58 | 3.0 |
| hsa-asg-5875 | 3.40 | 2.89 | 2.84 | 0.57 | 0 | 2.93E−02 | −1.58 | 3.0 |
| hsa-asg-8159 | 6.13 | 6.41 | 6.00 | 0.52 | 56 | 2.01E−02 | −1.58 | 3.0 |
| hsa-asg-10731 | 3.71 | 4.44 | 3.98 | 0.50 | 0 | 1.70E−02 | −1.57 | 3.0 |
| hsa-asg-13779 | 5.61 | 4.90 | 5.01 | 0.51 | 11 | 2.02E−02 | −1.57 | 3.0 |
| hsa-miR-566 | 6.02 | 5.42 | 5.89 | 0.47 | 56 | 1.37E−02 | −1.57 | 3.0 |
| hsa-asg-9886 | 6.88 | 7.05 | 6.51 | 0.64 | 67 | 4.81E−02 | −1.57 | 3.0 |
| hsa-asg-9511 | 6.36 | 6.48 | 6.67 | 0.47 | 100 | 1.37E−02 | −1.56 | 2.9 |
| hsa-cand109 | 7.10 | 6.68 | 7.02 | 0.48 | 100 | 1.58E−02 | −1.55 | 2.9 |
| hsa-asg-10971 | 6.43 | 5.04 | 6.01 | 0.54 | 78 | 2.66E−02 | −1.55 | 2.9 |
| hsa-asg-6422 | 4.50 | 4.97 | 4.22 | 0.63 | 11 | 4.99E−02 | −1.54 | 2.9 |
| hsa-asg-11500 | 4.99 | 5.04 | 4.85 | 0.34 | 0 | 2.43E−03 | −1.54 | 2.9 |
| hsa-asg-8121 | 5.69 | 6.11 | 5.46 | 0.50 | 22 | 1.91E−02 | −1.53 | 2.9 |
| hsa-asg-5880 | 4.08 | 4.90 | 4.43 | 0.62 | 11 | 4.70E−02 | −1.53 | 2.9 |
| hsa-asg-3714 | 6.92 | 5.61 | 6.27 | 0.63 | 78 | 4.94E−02 | −1.53 | 2.9 |
| hsa-asg-11228 | 7.68 | 7.87 | 7.47 | 0.50 | 100 | 2.00E−02 | −1.53 | 2.9 |
| hsa-asg-80 | 5.18 | 5.59 | 4.77 | 0.48 | 0 | 1.67E−02 | −1.53 | 2.9 |
| hsa-asg-11990 | 5.50 | 5.14 | 5.10 | 0.59 | 11 | 4.02E−02 | −1.52 | 2.9 |
| hsa-asg-14051 | 6.95 | 6.96 | 6.57 | 0.55 | 67 | 3.03E−02 | −1.52 | 2.9 |
| hsa-asg-9399 | 5.60 | 4.97 | 5.21 | 0.43 | 33 | 9.46E−03 | −1.52 | 2.9 |
| hsa-asg-6924 | 5.96 | 6.54 | 6.55 | 0.48 | 78 | 1.61E−02 | −1.52 | 2.9 |
| hsa-asg-10259 | 5.30 | 5.97 | 5.57 | 0.57 | 33 | 3.61E−02 | −1.52 | 2.9 |
| hsa-asg-2150 | 3.51 | 2.51 | 3.78 | 0.59 | 0 | 4.00E−02 | −1.52 | 2.9 |
| hsa-asg-7027 | 4.95 | 5.38 | 5.37 | 0.47 | 0 | 1.60E−02 | −1.51 | 2.8 |
| hsa-asg-8932 | 4.75 | 4.37 | 4.17 | 0.54 | 0 | 3.02E−02 | −1.51 | 2.8 |
| hsa-miR-422a | 9.22 | 9.12 | 9.20 | 0.33 | 100 | 2.54E−03 | −1.51 | 2.8 |
| hsa-asg-2468 | 2.41 | 3.22 | 2.80 | 0.61 | 0 | 4.70E−02 | −1.50 | 2.8 |
| hsa-asg-3347 | 3.71 | 4.64 | 3.60 | 0.53 | 0 | 2.71E−02 | −1.50 | 2.8 |
| hsa-asg-128 | 4.32 | 4.13 | 4.58 | 0.35 | 0 | 3.75E−03 | −1.50 | 2.8 |
| hsa-asg-819 | 7.70 | 7.36 | 7.51 | 0.56 | 100 | 3.42E−02 | −1.50 | 2.8 |
| hsa-asg-3503 | 4.66 | 4.44 | 3.67 | 0.57 | 0 | 3.60E−02 | −1.50 | 2.8 |
| hsa-asg-4971 | 6.32 | 6.57 | 5.93 | 0.60 | 44 | 4.46E−02 | −1.50 | 2.8 |
| hsa-asg-8115 | 3.51 | 3.94 | 3.53 | 0.38 | 0 | 5.74E−03 | −1.50 | 2.8 |
| hsa-cand892 | 4.91 | 5.52 | 5.06 | 0.55 | 0 | 3.28E−02 | −1.49 | 2.8 |
| hsa-asg-10007 | 7.78 | 7.69 | 7.34 | 0.42 | 56 | 9.61E−03 | −1.49 | 2.8 |
| hsa-asg-8565 | 5.98 | 5.83 | 6.32 | 0.60 | 67 | 4.62E−02 | −1.49 | 2.8 |
| hsa-asg-4372 | 6.11 | 7.26 | 6.28 | 0.59 | 89 | 4.48E−02 | −1.48 | 2.8 |
| hsa-asg-4843 | 6.39 | 6.76 | 6.18 | 0.40 | 67 | 7.95E−03 | −1.48 | 2.8 |
| hsa-asg-9870 | 4.61 | 5.51 | 5.11 | 0.55 | 11 | 3.32E−02 | −1.48 | 2.8 |
| hsa-asg-6183 | 6.60 | 6.28 | 6.47 | 0.54 | 56 | 3.28E−02 | −1.48 | 2.8 |
| hsa-asg-7429 | 4.19 | 4.51 | 4.26 | 0.54 | 0 | 3.10E−02 | −1.48 | 2.8 |
| hsa-asg-10805 | 7.18 | 6.87 | 6.94 | 0.57 | 100 | 3.86E−02 | −1.48 | 2.8 |
| hsa-asg-105 | 4.25 | 4.97 | 4.23 | 0.56 | 0 | 3.57E−02 | −1.48 | 2.8 |
| hsa-asg-1997 | 5.46 | 5.16 | 4.84 | 0.54 | 0 | 3.11E−02 | −1.48 | 2.8 |
| hsa-asg-2592 | 6.43 | 6.57 | 6.50 | 0.42 | 89 | 1.08E−02 | −1.48 | 2.8 |
| hsa-asg-11943 | 4.58 | 5.26 | 5.17 | 0.46 | 22 | 1.59E−02 | −1.47 | 2.8 |
| hsa-asg-12681 | 9.38 | 9.14 | 9.12 | 0.46 | 78 | 1.69E−02 | −1.47 | 2.8 |
| hsa-asg-7463 | 6.15 | 5.18 | 5.56 | 0.35 | 11 | 4.18E−03 | −1.47 | 2.8 |
| hsa-asg-4715 | 4.44 | 4.51 | 4.21 | 0.57 | 0 | 3.96E−02 | −1.47 | 2.8 |
| hsa-asg-5032 | 7.70 | 7.93 | 7.98 | 0.58 | 100 | 4.25E−02 | −1.46 | 2.8 |
| hsa-asg-3064 | 3.88 | 4.21 | 3.59 | 0.55 | 0 | 3.43E−02 | −1.46 | 2.8 |
| hsa-asg-4100 | 5.09 | 4.82 | 5.03 | 0.30 | 0 | 1.83E−03 | −1.46 | 2.8 |
| hsa-asg-7214 | 5.15 | 4.95 | 5.07 | 0.52 | 11 | 2.81E−02 | −1.46 | 2.8 |
| hsa-asg-4001 | 3.97 | 4.29 | 3.73 | 0.51 | 0 | 2.55E−02 | −1.46 | 2.8 |
| hsa-asg-8687 | 7.05 | 7.05 | 6.79 | 0.59 | 89 | 4.70E−02 | −1.46 | 2.8 |
| hsa-asg-6569 | 3.51 | 4.70 | 4.02 | 0.48 | 0 | 2.07E−02 | −1.45 | 2.7 |
| hsa-asg-7053 | 6.14 | 6.72 | 6.00 | 0.51 | 78 | 2.66E−02 | −1.45 | 2.7 |
| hsa-asg-3694 | 6.40 | 6.15 | 5.88 | 0.55 | 56 | 3.64E−02 | −1.45 | 2.7 |
| hsa-asg-1762 | 8.02 | 8.59 | 8.09 | 0.53 | 100 | 3.14E−02 | −1.44 | 2.7 |
| hsa-asg-8655 | 6.91 | 7.32 | 6.73 | 0.40 | 100 | 9.57E−03 | −1.44 | 2.7 |
| hsa-asg-3156 | 5.23 | 5.24 | 4.90 | 0.38 | 11 | 6.87E−03 | −1.44 | 2.7 |
| hsa-asg-10448 | 4.25 | 4.04 | 3.91 | 0.45 | 0 | 1.66E−02 | −1.44 | 2.7 |
| hsa-asg-7170 | 4.44 | 3.50 | 3.91 | 0.49 | 0 | 2.33E−02 | −1.44 | 2.7 |
| hsa-asg-13296 | 2.89 | 4.29 | 3.97 | 0.56 | 0 | 4.20E−02 | −1.44 | 2.7 |
| hsa-asg-12979 | 5.99 | 6.29 | 6.12 | 0.53 | 78 | 3.40E−02 | −1.44 | 2.7 |
| hsa-asg-9409 | 5.50 | 5.83 | 5.37 | 0.44 | 0 | 1.51E−02 | −1.43 | 2.7 |
| hsa-asg-7475 | 4.75 | 4.04 | 4.03 | 0.43 | 0 | 1.33E−02 | −1.43 | 2.7 |
| hsa-asg-12893 | 4.50 | 4.13 | 4.09 | 0.54 | 0 | 3.59E−02 | −1.42 | 2.7 |
| hsa-asg-8311 | 4.93 | 4.13 | 4.67 | 0.49 | 11 | 2.39E−02 | −1.42 | 2.7 |
| hsa-asg-4031 | 8.44 | 7.66 | 7.99 | 0.48 | 100 | 2.33E−02 | −1.42 | 2.7 |
| hsa-asg-3941 | 6.82 | 6.88 | 6.77 | 0.58 | 89 | 4.90E−02 | −1.41 | 2.7 |
| hsa-asg-8068 | 6.37 | 5.86 | 6.22 | 0.41 | 89 | 1.19E−02 | −1.41 | 2.7 |
| hsa-miR203 | 6.17 | 6.28 | 6.10 | 0.40 | 33 | 1.08E−02 | −1.41 | 2.7 |
| hsa-asg-773 | 7.34 | 6.93 | 6.88 | 0.47 | 100 | 2.12E−02 | −1.41 | 2.7 |
| hsa-asg-9117 | 4.68 | 5.88 | 5.57 | 0.53 | 0 | 3.67E−02 | −1.40 | 2.6 |
| hsa-asg-8946 | 4.61 | 4.87 | 4.45 | 0.56 | 0 | 4.62E−02 | −1.39 | 2.6 |
| hsa-miR-510 | 4.25 | 5.07 | 4.81 | 0.32 | 11 | 3.20E−03 | −1.39 | 2.6 |
| hsa-asg-7130 | 5.44 | 5.49 | 5.38 | 0.57 | 22 | 4.98E−02 | −1.39 | 2.6 |
| hsa-asg-11652 | 6.00 | 5.42 | 5.63 | 0.56 | 22 | 4.83E−02 | −1.39 | 2.6 |
| hsa-asg-9484 | 7.79 | 8.33 | 7.42 | 0.55 | 100 | 4.44E−02 | −1.38 | 2.6 |
| hsa-asg-4863 | 5.15 | 5.68 | 5.11 | 0.41 | 0 | 1.25E−02 | −1.38 | 2.6 |
| hsa-asg-7617 | 7.30 | 6.54 | 7.24 | 0.41 | 100 | 1.26E−02 | −1.38 | 2.6 |
| hsa-asg-12512 | 4.85 | 4.44 | 4.67 | 0.33 | 0 | 4.86E−03 | −1.36 | 2.6 |
| hsa-asg-8682 | 4.61 | 4.21 | 4.46 | 0.42 | 0 | 1.57E−02 | −1.35 | 2.6 |
| hsa-asg-11747 | 6.74 | 6.82 | 6.19 | 0.52 | 11 | 3.93E−02 | −1.35 | 2.6 |
| hsa-cand6 | 6.43 | 7.12 | 6.91 | 0.55 | 89 | 4.82E−02 | −1.34 | 2.5 |
| hsa-miR165 | 4.82 | 4.73 | 5.22 | 0.38 | 11 | 1.16E−02 | −1.31 | 2.5 |
| hsa-asg-9167 | 5.28 | 6.04 | 5.58 | 0.33 | 0 | 5.56E−03 | −1.31 | 2.5 |
| hsa-asg-3335 | 6.92 | 7.33 | 6.79 | 0.52 | 78 | 4.27E−02 | −1.31 | 2.5 |
| hsa-cand764 | 6.36 | 5.62 | 5.84 | 0.42 | 44 | 1.83E−02 | −1.30 | 2.5 |
| hsa-asg-6339 | 7.56 | 7.30 | 7.43 | 0.53 | 100 | 4.88E−02 | −1.30 | 2.5 |
| hsa-asg-5740 | 4.25 | 4.87 | 5.10 | 0.51 | 22 | 4.16E−02 | −1.30 | 2.5 |
| hsa-asg-8508 | 4.50 | 5.07 | 4.62 | 0.50 | 11 | 4.01E−02 | −1.30 | 2.5 |
| hsa-asg-2712 | 4.93 | 5.20 | 4.68 | 0.36 | 0 | 8.43E−03 | −1.30 | 2.5 |
| hsa-asg-6892 | 7.61 | 7.21 | 7.23 | 0.52 | 100 | 4.65E−02 | −1.30 | 2.5 |
| hsa-asg-9710 | 4.71 | 4.51 | 4.70 | 0.37 | 22 | 9.93E−03 | −1.29 | 2.5 |
| hsa-asg-4246 | 5.30 | 4.58 | 4.87 | 0.38 | 0 | 1.19E−02 | −1.29 | 2.4 |
| hsa-asg-2114 | 3.61 | 4.51 | 3.88 | 0.46 | 0 | 2.98E−02 | −1.29 | 2.4 |
| hsa-asg-8160 | 7.28 | 7.63 | 7.11 | 0.52 | 100 | 4.57E−02 | −1.29 | 2.4 |
| hsa-asg-11563 | 6.74 | 7.05 | 6.64 | 0.49 | 78 | 3.93E−02 | −1.28 | 2.4 |
| hsa-asg-9946 | 5.20 | 5.79 | 5.13 | 0.47 | 0 | 3.38E−02 | −1.28 | 2.4 |
| hsa-asg-7240 | 5.58 | 5.42 | 5.75 | 0.48 | 11 | 3.63E−02 | −1.27 | 2.4 |
| hsa-asg-9648 | 5.63 | 5.45 | 5.59 | 0.32 | 22 | 5.95E−03 | −1.27 | 2.4 |
| hsa-miR-487a | 3.71 | 3.62 | 3.72 | 0.20 | 0 | 3.55E−04 | −1.25 | 2.4 |
| hsa-asg-7507 | 4.89 | 5.40 | 4.54 | 0.51 | 0 | 4.86E−02 | −1.25 | 2.4 |
| hsa-asg-1833 | 3.51 | 4.29 | 3.92 | 0.49 | 0 | 4.17E−02 | −1.25 | 2.4 |
| hsa-cand634 | 8.30 | 8.32 | 8.30 | 0.48 | 100 | 3.82E−02 | −1.25 | 2.4 |
| hsa-asg-5507 | 4.12 | 4.92 | 4.27 | 0.45 | 11 | 3.17E−02 | −1.25 | 2.4 |
| hsa-asg-3969 | 6.13 | 6.49 | 6.18 | 0.42 | 89 | 2.42E−02 | −1.23 | 2.3 |
| hsa-cand471 | 8.82 | 8.46 | 8.74 | 0.49 | 100 | 4.45E−02 | −1.23 | 2.3 |
| hsa-cand356 | 5.30 | 5.67 | 5.18 | 0.30 | 0 | 5.02E−03 | −1.21 | 2.3 |
| hsa-asg-6876 | 5.43 | 6.02 | 5.31 | 0.35 | 0 | 1.16E−02 | −1.21 | 2.3 |
| hsa-miR-422b | 10.7 | 10.5 | 10.7 | 0.28 | 100 | 3.76E−03 | −1.20 | 2.3 |
| hsa-asg-14002 | 5.53 | 6.57 | 5.62 | 0.47 | 11 | 4.40E−02 | −1.19 | 2.3 |
| hsa-asg-2864 | 5.13 | 5.67 | 5.35 | 0.29 | 11 | 4.97E−03 | −1.19 | 2.3 |
| hsa-asg-12328 | 2.97 | 3.06 | 2.94 | 0.37 | 0 | 1.68E−02 | −1.19 | 2.3 |
| hsa-cand753 | 5.33 | 5.61 | 5.36 | 0.40 | 33 | 2.36E−02 | −1.18 | 2.3 |
| hsa-asg-9513 | 6.45 | 6.64 | 6.13 | 0.46 | 78 | 4.25E−02 | −1.18 | 2.3 |
| hsa-asg-9021 | 7.88 | 7.54 | 7.79 | 0.40 | 100 | 2.28E−02 | −1.17 | 2.3 |
| hsa-asg-8954 | 5.65 | 6.20 | 5.90 | 0.47 | 67 | 4.46E−02 | −1.17 | 2.2 |
| hsa-asg-3653 | 6.49 | 6.04 | 6.10 | 0.38 | 78 | 2.06E−02 | −1.16 | 2.2 |
| hsa-asg-739 | 4.19 | 4.97 | 4.79 | 0.41 | 33 | 2.92E−02 | −1.16 | 2.2 |
| hsa-asg-14038 | 7.48 | 7.30 | 7.43 | 0.23 | 78 | 1.69E−03 | −1.15 | 2.2 |
| hsa-asg-8549 | 8.43 | 8.53 | 8.16 | 0.41 | 100 | 2.99E−02 | −1.15 | 2.2 |
| hsa-asg-9209 | 6.55 | 6.38 | 6.38 | 0.39 | 67 | 2.58E−02 | −1.14 | 2.2 |
| hsa-asg-4564 | 5.66 | 5.52 | 5.72 | 0.42 | 33 | 3.32E−02 | −1.13 | 2.2 |
| hsa-asg-8995 | 7.98 | 7.71 | 7.73 | 0.42 | 100 | 3.72E−02 | −1.11 | 2.2 |
| hsa-asg-2862 | 6.67 | 6.53 | 6.81 | 0.37 | 22 | 2.33E−02 | −1.09 | 2.1 |
| hsa-asg-1233 | 9.15 | 8.89 | 9.04 | 0.38 | 78 | 2.75E−02 | −1.08 | 2.1 |
| hsa-asg-13791 | 4.19 | 5.07 | 4.38 | 0.34 | 0 | 1.61E−02 | −1.08 | 2.1 |
| hsa-asg-77552 | 4.89 | 4.04 | 4.71 | 0.34 | 11 | 1.76E−02 | −1.08 | 2.1 |
| hsa-miR-379 | 6.13 | 6.20 | 6.58 | 0.37 | 100 | 2.49E−02 | −1.07 | 2.1 |
| hsa-asg-2230 | 5.18 | 5.74 | 5.28 | 0.43 | 0 | 4.59E−02 | −1.07 | 2.1 |
| hsa-asg-2014 | 4.66 | 4.04 | 4.72 | 0.42 | 0 | 4.45E−02 | −1.06 | 2.1 |
| hsa-asg-2284 | 4.89 | 4.76 | 4.65 | 0.39 | 0 | 3.59E−02 | −1.03 | 2.0 |
| hsa-asg-1717 | 4.61 | 4.37 | 4.33 | 0.42 | 0 | 4.69E−02 | −1.03 | 2.0 |
| hsa-asg-1431 | 5.33 | 5.07 | 5.03 | 0.34 | 0 | 2.10E−02 | −1.02 | 2.0 |
| hsa-asg-8529 | 7.40 | 6.47 | 6.85 | 0.41 | 100 | 4.68E−02 | −1.02 | 2.0 |
| hsa-asg-3722 | 9.00 | 8.68 | 8.92 | 0.37 | 100 | 3.00E−02 | −1.02 | 2.0 |

SD, standard deviation;
%, percentage of samples expressing miRNA above background levels;
Log2Diff, difference in VSN-transformed expression bewteen SI and LNneg samples.

### Example 38

### Differentially-Expressed miRNAs, Most Commonly Observed, Between 21 Normal Tissue Types and Normal Lymph Nodes

[0352] The inventors compiled a listing of miRNAs representing those that were observed by microarray expression analysis to be the miRNAs most frequently differentially-expressed between each of 21 normal tissue types and normal lymph nodes. The listing describes miRNAs whose differential expression was characterized by a p-value<0.05 and a level of expression at least 10-fold higher in a particular tissue compared to normal lymph nodes. The presence of a “1” in the column indicates that a differentially expressed miRNA fulfills the criteria described above for a particular tissue; whereas a “0” in the column indicates that the miRNA does not fulfill the criteria. The column on the right indicates the number of time a miRNA was identified as differentially expressed between the 21 normal tissues and normal lymph nodes. Among the most common differentially expressed miRNAs identified, four (hsa-miR-200a, -200b, -200c, and -429) were identified as differentially expressed between fifteen different tissues and normal lymph nodes; hsa-miR-605 and -187 were identified as differentially expressed between 14 or 13 different tissues, respectively, and normal lymph nodes; five miRNAs (the predicted miRNA hsa-asg-7637-st2 and the verified miRNAs hsa-miR-203, -375, -411, and -487b) were identified as differentially expressed between 12 different tissues and normal lymph nodes; 5 miRNAs (two predicted miRNAs, hsa-asg-14153_st2, and -5021_st1 and three verified miRNAs, hsa-miR-368, -493-5p, and -495) were identified 11 times; and 4 miRNAs (hsa-miR-141, -154, -205, and 381) were identified as differentially expressed between 10 different tissues and normal lymph nodes. In addition, a total of 229 miRNAs were found differentially expressed between only one particular tissue and normal lymph nodes. These miRNAs may potentially be used to specifically identify or confirm the origin of the tissue present in a metastatic lymph node.

TABLE 37
Differentially-expressed miRNAS, most commonly observed,
between each of 21 normal tissue types and normal lymph nodes.

| Probe ID | TYR | KID | STO | TES | UTR | SPL | BRN | TNG | THY | TRA | SI |
|---|---|---|---|---|---|---|---|---|---|---|---|
| hsa-miR-200a_st2 | 1 | 1 | 1 | 0 | 0 | 0 | 0 | 1 | 1 | 1 | 1 |
| hsa-miR-200b_st1 | 1 | 1 | 1 | 0 | 0 | 0 | 0 | 1 | 1 | 1 | 1 |
| hsa-miR-200c_st1 | 1 | 1 | 1 | 0 | 0 | 0 | 0 | 1 | 1 | 1 | 1 |
| hsa-miR-429_st1 | 1 | 1 | 1 | 0 | 0 | 0 | 0 | 1 | 1 | 1 | 1 |
| hsa-miR-605_st1 | 1 | 1 | 1 | 0 | 0 | 0 | 0 | 1 | 1 | 1 | 1 |
| hsa-miR-187_st1 | 0 | 1 | 0 | 1 | 1 | 0 | 1 | 1 | 0 | 1 | 1 |
| hsa-asg-7637_st2 | 0 | 1 | 1 | 0 | 0 | 0 | 0 | 1 | 1 | 1 | 1 |
| hsa-miR-203_st2 | 1 | 1 | 1 | 0 | 0 | 0 | 0 | 1 | 1 | 1 | 0 |
| hsa-miR-375_st1 | 0 | 0 | 1 | 0 | 0 | 0 | 0 | 1 | 1 | 1 | 1 |
| hsa-miR-411_st1 | 0 | 1 | 0 | 1 | 1 | 1 | 1 | 1 | 1 | 0 | 0 |
| hsa-miR-487b_st2 | 0 | 0 | 0 | 1 | 1 | 1 | 1 | 1 | 1 | 0 | 0 |
| hsa-asg-14153_st2 | 0 | 1 | 1 | 0 | 0 | 0 | 0 | 1 | 1 | 1 | 0 |
| hsa-asg-5021_st1 | 0 | 0 | 0 | 1 | 1 | 1 | 1 | 1 | 0 | 0 | 0 |
| hsa-miR-368_st2 | 1 | 0 | 0 | 1 | 1 | 1 | 0 | 1 | 1 | 0 | 0 |
| hsa-miR-493-5p_st1 | 0 | 1 | 0 | 1 | 1 | 1 | 0 | 1 | 1 | 0 | 0 |
| hsa-miR-495_st1 | 0 | 0 | 0 | 1 | 1 | 1 | 1 | 1 | 1 | 1 | 0 |
| hsa-miR-141_st1 | 1 | 1 | 1 | 0 | 0 | 0 | 0 | 1 | 0 | 1 | 1 |
| hsa-miR-154_st2 | 0 | 1 | 0 | 1 | 1 | 1 | 1 | 1 | 0 | 0 | 0 |
| hsa-miR-205_st1 | 0 | 0 | 1 | 0 | 0 | 0 | 0 | 1 | 1 | 1 | 0 |
| hsa-miR-381_st2 | 1 | 0 | 0 | 1 | 1 | 1 | 1 | 1 | 0 | 0 | 0 |
| hsa-asg-11715_st2 | 1 | 1 | 1 | 0 | 0 | 0 | 0 | 1 | 1 | 1 | 1 |
| hsa-asg-13254_st1 | 0 | 0 | 0 | 1 | 1 | 1 | 1 | 1 | 0 | 1 | 0 |
| hsa-asg-13404_st2 | 0 | 0 | 0 | 1 | 1 | 1 | 1 | 1 | 1 | 0 | 0 |
| hsa-asg-924_st1 | 0 | 1 | 1 | 0 | 0 | 0 | 1 | 1 | 0 | 1 | 1 |
| hsa-asg-5617_st1 | 0 | 0 | 0 | 1 | 1 | 1 | 1 | 1 | 0 | 0 | 0 |
| hsa-miR-539_st1 | 0 | 0 | 0 | 1 | 0 | 1 | 1 | 1 | 0 | 0 | 0 |
| hsa-miR202_st2 | 0 | 0 | 0 | 1 | 1 | 1 | 1 | 0 | 1 | 0 | 0 |
| hsa-asg-10049_st1 | 0 | 0 | 0 | 1 | 0 | 1 | 1 | 1 | 0 | 1 | 0 |
| hsa-miR-127_st1 | 0 | 0 | 0 | 1 | 1 | 1 | 1 | 1 | 0 | 0 | 0 |
| hsa-miR-133a_st1 | 1 | 0 | 0 | 0 | 1 | 0 | 0 | 1 | 0 | 0 | 0 |
| hsa-miR-133b_st2 | 1 | 0 | 0 | 0 | 0 | 0 | 0 | 1 | 0 | 0 | 0 |
| hsa-miR-299-5p_st2 | 0 | 0 | 0 | 1 | 1 | 0 | 1 | 1 | 0 | 0 | 0 |
| hsa-miR-432_st2 | 0 | 0 | 0 | 1 | 0 | 1 | 1 | 0 | 0 | 0 | 0 |
| hsa-asg-10131_st2 | 0 | 0 | 1 | 0 | 0 | 0 | 0 | 1 | 0 | 1 | 0 |
| hsa-asg-14182_st1 | 0 | 1 | 1 | 0 | 0 | 0 | 0 | 0 | 0 | 0 | 1 |
| hsa-asg-7472_st2 | 0 | 0 | 0 | 1 | 0 | 1 | 1 | 1 | 0 | 0 | 0 |
| hsa-cand206_st1 | 0 | 0 | 0 | 1 | 0 | 1 | 1 | 1 | 0 | 0 | 0 |
| hsa-miR-204_st2 | 0 | 1 | 0 | 1 | 1 | 0 | 1 | 0 | 0 | 0 | 0 |
| hsa-miR-215_st1 | 0 | 1 | 1 | 0 | 0 | 0 | 0 | 0 | 0 | 0 | 1 |
| hsa-miR-383_st1 | 0 | 0 | 0 | 1 | 1 | 0 | 1 | 0 | 1 | 1 | 0 |
| hsa-miR-424_st1 | 0 | 1 | 0 | 1 | 1 | 1 | 0 | 0 | 0 | 0 | 0 |
| hsa-asg-13166_st2 | 0 | 0 | 0 | 1 | 0 | 1 | 1 | 0 | 0 | 0 | 0 |
| hsa-miR-134_st2 | 0 | 0 | 0 | 1 | 0 | 1 | 1 | 0 | 0 | 0 | 0 |
| hsa-miR-192_st2 | 0 | 1 | 1 | 0 | 0 | 0 | 0 | 0 | 0 | 0 | 0 |
| hsa-miR-194_st2 | 0 | 1 | 1 | 0 | 0 | 0 | 0 | 0 | 0 | 0 | 1 |
| hsa-miR-206_st2 | 1 | 0 | 0 | 0 | 0 | 0 | 0 | 1 | 0 | 0 | 0 |
| hsa-miR-338_st1 | 0 | 0 | 0 | 0 | 0 | 1 | 1 | 0 | 0 | 0 | 0 |
| hsa-miR-379_st1 | 0 | 0 | 0 | 1 | 0 | 0 | 1 | 1 | 0 | 0 | 0 |
| hsa-miR-410_st1 | 0 | 0 | 0 | 1 | 0 | 1 | 1 | 0 | 0 | 0 | 0 |
| hsa-miR-542-5p_st2 | 0 | 1 | 0 | 1 | 0 | 1 | 0 | 0 | 0 | 0 | 0 |
| hsa-asg-12139_st2 | 0 | 0 | 1 | 0 | 0 | 0 | 0 | 1 | 0 | 1 | 0 |
| hsa-asg-12227_st1 | 0 | 1 | 1 | 0 | 0 | 0 | 0 | 0 | 0 | 1 | 0 |
| hsa-asg-13705_st1 | 0 | 0 | 1 | 0 | 0 | 0 | 0 | 1 | 0 | 1 | 0 |
| hsa-asg-2027_st1 | 1 | 0 | 0 | 0 | 0 | 0 | 0 | 1 | 0 | 0 | 0 |
| hsa-asg-2345_st2 | 1 | 0 | 0 | 0 | 0 | 0 | 0 | 1 | 0 | 0 | 0 |
| hsa-asg-8428_st2 | 0 | 0 | 1 | 0 | 0 | 0 | 0 | 1 | 0 | 0 | 0 |
| hsa-miR-184_st1 | 0 | 1 | 0 | 1 | 0 | 0 | 1 | 0 | 0 | 0 | 0 |
| hsa-miR-189_st1 | 0 | 0 | 0 | 0 | 1 | 0 | 0 | 0 | 0 | 0 | 0 |
| hsa-miR-200a-_st2 | 0 | 1 | 1 | 0 | 0 | 0 | 0 | 0 | 0 | 1 | 0 |
| hsa-miR-34c_st2 | 0 | 0 | 0 | 1 | 0 | 0 | 0 | 1 | 0 | 1 | 0 |
| hsa-miR-376a_st2 | 0 | 0 | 0 | 0 | 1 | 0 | 0 | 0 | 0 | 0 | 0 |
| hsa-miR-376b_st1 | 0 | 0 | 0 | 1 | 0 | 1 | 0 | 1 | 0 | 0 | 0 |
| hsa-miR-382_st1 | 0 | 0 | 0 | 1 | 0 | 0 | 1 | 0 | 0 | 0 | 0 |
| hsa-miR-409-3p_st1 | 0 | 0 | 0 | 1 | 0 | 1 | 1 | 0 | 0 | 0 | 0 |
| hsa-miR-485-5p_st2 | 0 | 0 | 0 | 1 | 0 | 0 | 1 | 0 | 0 | 0 | 0 |
| hsa-miR-592_st1 | 0 | 0 | 1 | 0 | 0 | 0 | 1 | 0 | 0 | 0 | 0 |
| hsa-miR-96_st1 | 0 | 0 | 1 | 0 | 0 | 0 | 0 | 0 | 1 | 0 | 0 |
| hsa-miR-9_st2 | 0 | 1 | 0 | 0 | 1 | 0 | 1 | 0 | 0 | 0 | 0 |
| hsa-miR23_st2 | 0 | 0 | 0 | 1 | 0 | 1 | 1 | 0 | 0 | 0 | 0 |
| hsa-asg-1088_st1 | 0 | 1 | 0 | 1 | 0 | 0 | 0 | 0 | 1 | 0 | 0 |
| hsa-asg-11443_st1 | 0 | 1 | 0 | 0 | 1 | 0 | 0 | 0 | 0 | 0 | 0 |
| hsa-asg-1296_st1 | 0 | 0 | 0 | 0 | 0 | 0 | 0 | 1 | 0 | 1 | 0 |
| hsa-asg-14208_st1 | 0 | 1 | 0 | 1 | 0 | 0 | 0 | 0 | 0 | 0 | 0 |
| hsa-asg-14228_st2 | 0 | 1 | 0 | 0 | 1 | 0 | 0 | 0 | 0 | 0 | 0 |
| hsa-asg-1521_st1 | 0 | 0 | 0 | 0 | 0 | 1 | 1 | 1 | 0 | 0 | 0 |
| hsa-asg-1794_st1 | 0 | 0 | 0 | 0 | 0 | 0 | 0 | 1 | 0 | 0 | 0 |
| hsa-asg-4915_st1 | 1 | 1 | 0 | 0 | 0 | 0 | 0 | 0 | 0 | 0 | 0 |
| hsa-asg-4978_st2 | 0 | 1 | 1 | 0 | 0 | 0 | 0 | 0 | 0 | 1 | 0 |
| hsa-asg-5119_st1 | 0 | 0 | 1 | 0 | 0 | 0 | 0 | 0 | 0 | 1 | 0 |
| hsa-asg-5638_st2 | 0 | 1 | 0 | 1 | 0 | 0 | 0 | 0 | 0 | 0 | 0 |
| hsa-asg-8128_st1 | 0 | 0 | 0 | 1 | 0 | 0 | 0 | 0 | 0 | 0 | 0 |
| hsa-asg-9696_st1 | 0 | 0 | 0 | 1 | 0 | 0 | 0 | 0 | 0 | 0 | 0 |
| hsa-cand150_st2 | 0 | 0 | 0 | 1 | 0 | 0 | 0 | 0 | 0 | 1 | 0 |
| hsa-miR-132_st1 | 0 | 0 | 0 | 0 | 1 | 0 | 1 | 0 | 0 | 0 | 0 |
| hsa-miR-149_st2 | 0 | 0 | 0 | 0 | 0 | 0 | 1 | 0 | 1 | 0 | 0 |
| hsa-miR-31_st2 | 0 | 0 | 1 | 0 | 0 | 0 | 0 | 0 | 0 | 1 | 0 |
| hsa-miR-369-5p_st2 | 0 | 0 | 0 | 1 | 0 | 0 | 0 | 0 | 0 | 0 | 0 |
| hsa-miR-433_st2 | 0 | 0 | 0 | 1 | 0 | 0 | 1 | 0 | 0 | 0 | 0 |
| hsa-miR-449_st2 | 0 | 0 | 0 | 1 | 0 | 0 | 0 | 0 | 0 | 1 | 0 |
| hsa-miR-450_st2 | 0 | 0 | 0 | 1 | 0 | 1 | 0 | 0 | 0 | 0 | 0 |
| hsa-miR-582_st1 | 0 | 1 | 0 | 0 | 1 | 0 | 0 | 0 | 0 | 0 | 0 |
| hsa-miR-9-_st2 | 0 | 0 | 0 | 0 | 1 | 0 | 1 | 0 | 0 | 0 | 0 |
| hsa-miR12_st1 | 1 | 0 | 0 | 0 | 0 | 0 | 0 | 1 | 0 | 0 | 0 |
| hsa-miR144_st2 | 0 | 1 | 0 | 0 | 1 | 0 | 0 | 0 | 0 | 0 | 0 |
| hsa-asg-10080_st1 | 0 | 0 | 0 | 0 | 0 | 0 | 0 | 0 | 0 | 1 | 0 |
| hsa-asg-10202_st2 | 0 | 0 | 0 | 0 | 0 | 0 | 1 | 0 | 0 | 0 | 0 |
| hsa-asg-10247_st1 | 0 | 0 | 0 | 0 | 0 | 0 | 0 | 0 | 0 | 1 | 0 |
| hsa-asg-10309_st1 | 1 | 0 | 0 | 1 | 0 | 0 | 0 | 0 | 0 | 0 | 0 |
| hsa-asg-10393_st1 | 1 | 0 | 0 | 0 | 0 | 0 | 0 | 1 | 0 | 0 | 0 |
| hsa-asg-10881_st1 | 0 | 0 | 0 | 0 | 0 | 1 | 1 | 0 | 0 | 0 | 0 |
| hsa-asg-10883_st1 | 0 | 0 | 0 | 0 | 0 | 0 | 0 | 0 | 0 | 0 | 0 |
| hsa-asg-11088_st1 | 0 | 0 | 0 | 0 | 0 | 0 | 0 | 1 | 0 | 0 | 0 |
| hsa-asg-11338_st2 | 0 | 0 | 0 | 1 | 0 | 0 | 0 | 0 | 0 | 0 | 0 |
| hsa-asg-13135_st1 | 0 | 0 | 0 | 0 | 0 | 1 | 1 | 0 | 0 | 0 | 0 |
| hsa-asg-13231_st1 | 0 | 0 | 0 | 0 | 0 | 0 | 0 | 0 | 0 | 1 | 0 |
| hsa-asg-13284_st1 | 0 | 0 | 0 | 0 | 0 | 0 | 1 | 0 | 0 | 0 | 0 |
| hsa-asg-13922_st1 | 0 | 0 | 0 | 1 | 0 | 0 | 0 | 0 | 0 | 0 | 0 |
| hsa-asg-14065_st2 | 0 | 0 | 0 | 0 | 1 | 0 | 0 | 1 | 0 | 0 | 0 |
| hsa-asg-2399_st2 | 1 | 0 | 0 | 0 | 0 | 0 | 0 | 1 | 0 | 0 | 0 |
| hsa-asg-2424_st1 | 0 | 0 | 1 | 0 | 0 | 0 | 0 | 0 | 0 | 1 | 0 |
| hsa-asg-2484_st2 | 1 | 0 | 0 | 0 | 0 | 0 | 0 | 1 | 0 | 0 | 0 |
| hsa-asg-3081_st1 | 1 | 0 | 0 | 1 | 0 | 0 | 0 | 0 | 0 | 0 | 0 |
| hsa-asg-3822_st2 | 0 | 0 | 0 | 0 | 0 | 0 | 0 | 0 | 0 | 1 | 0 |
| hsa-asg-3983_st1 | 1 | 0 | 0 | 0 | 0 | 0 | 0 | 0 | 0 | 0 | 0 |
| hsa-asg-4209_st2 | 1 | 0 | 0 | 0 | 0 | 0 | 0 | 0 | 0 | 0 | 0 |
| hsa-asg-4219_st1 | 0 | 0 | 1 | 0 | 0 | 0 | 0 | 0 | 0 | 1 | 0 |
| hsa-asg-4438_st2 | 0 | 0 | 0 | 0 | 0 | 0 | 0 | 0 | 0 | 1 | 0 |
| hsa-asg-4439_st2 | 0 | 0 | 0 | 0 | 0 | 0 | 0 | 0 | 0 | 1 | 0 |
| hsa-asg-5602_st2 | 0 | 0 | 0 | 0 | 0 | 0 | 0 | 0 | 0 | 0 | 0 |
| hsa-asg-5630_st2 | 0 | 0 | 0 | 1 | 0 | 0 | 0 | 0 | 0 | 0 | 0 |
| hsa-asg-6283_st1 | 1 | 0 | 0 | 1 | 0 | 0 | 0 | 0 | 0 | 0 | 0 |
| hsa-asg-7295_st2 | 0 | 0 | 0 | 1 | 0 | 0 | 1 | 0 | 0 | 0 | 0 |
| hsa-asg-8480_st1 | 0 | 0 | 0 | 1 | 0 | 1 | 0 | 0 | 0 | 0 | 0 |
| hsa-asg-8616_st2 | 0 | 0 | 0 | 1 | 0 | 0 | 0 | 0 | 0 | 0 | 0 |
| hsa-asg-9198_st1 | 0 | 0 | 0 | 0 | 0 | 0 | 0 | 1 | 0 | 0 | 0 |
| hsa-asg-9219_st2 | 0 | 0 | 1 | 0 | 0 | 0 | 0 | 0 | 0 | 0 | 0 |
| hsa-asg-9262_st1 | 0 | 0 | 0 | 1 | 0 | 0 | 0 | 0 | 0 | 0 | 1 |
| hsa-asg-9269_st2 | 0 | 0 | 0 | 0 | 0 | 0 | 0 | 0 | 0 | 1 | 0 |
| hsa-asg-9514_st1 | 0 | 0 | 0 | 1 | 0 | 0 | 1 | 0 | 0 | 0 | 0 |
| hsa-asg-9687_st1 | 0 | 0 | 0 | 0 | 0 | 0 | 0 | 0 | 0 | 0 | 0 |
| hsa-asg-9830_st2 | 0 | 0 | 0 | 0 | 0 | 0 | 0 | 0 | 0 | 1 | 0 |
| hsa-cand14_st1 | 1 | 0 | 0 | 0 | 0 | 0 | 0 | 1 | 0 | 0 | 0 |
| hsa-cand26_st2 | 0 | 0 | 0 | 0 | 0 | 1 | 1 | 0 | 0 | 0 | 0 |
| hsa-cand317_st1 | 0 | 0 | 1 | 0 | 0 | 0 | 0 | 0 | 0 | 0 | 1 |
| hsa-cand79_st1 | 0 | 1 | 0 | 0 | 0 | 0 | 1 | 0 | 0 | 0 | 0 |
| hsa-miR-105_st1 | 0 | 0 | 0 | 1 | 0 | 0 | 1 | 0 | 0 | 0 | 0 |
| hsa-miR-139_st2 | 0 | 0 | 0 | 0 | 0 | 1 | 1 | 0 | 0 | 0 | 0 |
| hsa-miR-154-_st2 | 0 | 0 | 0 | 1 | 0 | 0 | 1 | 0 | 0 | 0 | 0 |
| hsa-miR-182_st1 | 0 | 0 | 0 | 0 | 0 | 0 | 0 | 0 | 1 | 0 | 0 |
| hsa-miR-183_st1 | 0 | 0 | 0 | 0 | 0 | 0 | 0 | 0 | 1 | 0 | 0 |
| hsa-miR-328_st1 | 0 | 0 | 0 | 0 | 0 | 0 | 1 | 0 | 0 | 0 | 0 |
| hsa-miR-329_st1 | 0 | 0 | 0 | 1 | 0 | 0 | 0 | 0 | 0 | 0 | 0 |
| hsa-miR-378_st1 | 0 | 0 | 0 | 0 | 0 | 0 | 0 | 1 | 0 | 0 | 0 |
| hsa-miR-380-3p_st2 | 0 | 0 | 0 | 1 | 0 | 0 | 1 | 0 | 0 | 0 | 0 |
| hsa-miR-409-5p_st1 | 0 | 0 | 0 | 1 | 0 | 0 | 1 | 0 | 0 | 0 | 0 |
| hsa-miR-449b_st1 | 0 | 0 | 0 | 1 | 0 | 0 | 0 | 0 | 0 | 1 | 0 |
| hsa-miR-487a_st2 | 0 | 0 | 0 | 1 | 0 | 0 | 1 | 0 | 0 | 0 | 0 |
| hsa-miR-494_st1 | 0 | 0 | 0 | 1 | 0 | 0 | 0 | 0 | 0 | 0 | 0 |
| hsa-miR-503_st1 | 0 | 0 | 0 | 1 | 0 | 0 | 0 | 0 | 0 | 0 | 0 |
| hsa-miR-508_st1 | 0 | 0 | 0 | 1 | 0 | 0 | 0 | 0 | 0 | 0 | 0 |
| hsa-miR-509_st2 | 0 | 0 | 0 | 1 | 0 | 0 | 0 | 0 | 0 | 0 | 0 |
| hsa-miR-513_st1 | 0 | 0 | 0 | 1 | 0 | 0 | 0 | 0 | 0 | 0 | 0 |
| hsa-miR-576_st2 | 0 | 0 | 0 | 0 | 0 | 0 | 0 | 1 | 0 | 0 | 0 |
| hsa-miR-7_st1 | 0 | 0 | 0 | 0 | 0 | 0 | 1 | 0 | 0 | 0 | 0 |
| hsa-asg-1020_st2 | 0 | 0 | 0 | 1 | 0 | 0 | 0 | 0 | 0 | 0 | 0 |
| hsa-asg-10250_st1 | 0 | 0 | 0 | 0 | 0 | 0 | 0 | 1 | 0 | 0 | 0 |
| hsa-asg-10304_st1 | 0 | 0 | 0 | 0 | 0 | 0 | 1 | 0 | 0 | 0 | 0 |
| hsa-asg-1035_st2 | 0 | 0 | 0 | 0 | 0 | 0 | 0 | 0 | 0 | 0 | 0 |
| hsa-asg-10378_st1 | 0 | 0 | 0 | 0 | 0 | 0 | 0 | 0 | 0 | 0 | 0 |
| hsa-asg-10478_st2 | 0 | 0 | 0 | 1 | 0 | 0 | 0 | 0 | 0 | 0 | 0 |
| hsa-asg-1089_st1 | 0 | 0 | 0 | 1 | 0 | 0 | 0 | 0 | 0 | 0 | 0 |
| hsa-asg-10947_st1 | 0 | 0 | 0 | 1 | 0 | 0 | 0 | 0 | 0 | 0 | 0 |
| hsa-asg-11391_st1 | 0 | 0 | 0 | 0 | 0 | 0 | 0 | 0 | 0 | 0 | 0 |
| hsa-asg-11425_st1 | 0 | 0 | 0 | 0 | 0 | 0 | 0 | 0 | 0 | 0 | 0 |
| hsa-asg-11463_st1 | 0 | 0 | 1 | 0 | 0 | 0 | 0 | 0 | 0 | 0 | 0 |
| hsa-asg-11612_st1 | 0 | 0 | 0 | 0 | 0 | 0 | 0 | 0 | 0 | 0 | 1 |
| hsa-asg-11777_st1 | 0 | 0 | 0 | 0 | 0 | 0 | 0 | 1 | 0 | 0 | 0 |
| hsa-asg-1196_st1 | 0 | 0 | 0 | 1 | 0 | 0 | 0 | 0 | 0 | 0 | 0 |
| hsa-asg-1199_st1 | 0 | 0 | 0 | 1 | 0 | 0 | 0 | 0 | 0 | 0 | 0 |
| hsa-asg-1203_st1 | 0 | 0 | 0 | 1 | 0 | 0 | 0 | 0 | 0 | 0 | 0 |
| hsa-asg-12142_st1 | 0 | 0 | 0 | 0 | 0 | 0 | 0 | 1 | 0 | 0 | 0 |
| hsa-asg-12172_st2 | 1 | 0 | 0 | 0 | 0 | 0 | 0 | 0 | 0 | 0 | 0 |
| hsa-asg-12250_st2 | 0 | 0 | 0 | 0 | 0 | 0 | 1 | 0 | 0 | 0 | 0 |
| hsa-asg-12253_st2 | 0 | 0 | 0 | 1 | 0 | 0 | 0 | 0 | 0 | 0 | 0 |
| hsa-asg-12356_st1 | 0 | 0 | 0 | 1 | 0 | 0 | 0 | 0 | 0 | 0 | 0 |
| hsa-asg-12440_st2 | 0 | 0 | 0 | 1 | 0 | 0 | 0 | 0 | 0 | 0 | 0 |
| hsa-asg-124_st1 | 0 | 0 | 0 | 1 | 0 | 0 | 0 | 0 | 0 | 0 | 0 |
| hsa-asg-12515_st2 | 0 | 0 | 0 | 1 | 0 | 0 | 0 | 0 | 0 | 0 | 0 |
| hsa-asg-12531_st1 | 0 | 0 | 0 | 1 | 0 | 0 | 0 | 0 | 0 | 0 | 0 |
| hsa-asg-12552_st1 | 0 | 0 | 0 | 0 | 0 | 0 | 0 | 0 | 0 | 0 | 1 |
| hsa-asg-1260_st1 | 0 | 1 | 0 | 0 | 0 | 0 | 0 | 0 | 0 | 0 | 0 |
| hsa-asg-1270_st2 | 0 | 0 | 0 | 1 | 0 | 0 | 0 | 0 | 0 | 0 | 0 |
| hsa-asg-12735_st1 | 0 | 0 | 0 | 1 | 0 | 0 | 0 | 0 | 0 | 0 | 0 |
| hsa-asg-12799_st1 | 0 | 1 | 0 | 0 | 0 | 0 | 0 | 0 | 0 | 0 | 0 |
| hsa-asg-12824_st1 | 0 | 0 | 0 | 0 | 0 | 0 | 1 | 0 | 0 | 0 | 0 |
| hsa-asg-128_st2 | 0 | 0 | 0 | 0 | 0 | 0 | 0 | 1 | 0 | 0 | 0 |
| hsa-asg-12959_st1 | 0 | 0 | 0 | 1 | 0 | 0 | 0 | 0 | 0 | 0 | 0 |
| hsa-asg-13077_st1 | 0 | 0 | 0 | 1 | 0 | 0 | 0 | 0 | 0 | 0 | 0 |
| hsa-asg-13097_st1 | 0 | 0 | 0 | 0 | 0 | 0 | 0 | 0 | 0 | 0 | 0 |
| hsa-asg-13159_st1 | 0 | 0 | 0 | 0 | 0 | 0 | 1 | 0 | 0 | 0 | 0 |
| hsa-asg-13160_st1 | 0 | 0 | 0 | 1 | 0 | 0 | 0 | 0 | 0 | 0 | 0 |
| hsa-asg-13258_st2 | 0 | 0 | 0 | 0 | 0 | 0 | 0 | 0 | 0 | 0 | 0 |
| hsa-asg-13498_st1 | 0 | 0 | 0 | 0 | 0 | 0 | 0 | 0 | 0 | 0 | 1 |
| hsa-asg-13589_st2 | 0 | 0 | 0 | 0 | 0 | 0 | 1 | 0 | 0 | 0 | 0 |
| hsa-asg-13646_st1 | 0 | 0 | 0 | 0 | 0 | 0 | 0 | 0 | 0 | 0 | 0 |
| hsa-asg-13741_st2 | 0 | 0 | 0 | 1 | 0 | 0 | 0 | 0 | 0 | 0 | 0 |
| hsa-asg-1375_st1 | 1 | 0 | 0 | 0 | 0 | 0 | 0 | 0 | 0 | 0 | 0 |
| hsa-asg-13801_st1 | 0 | 0 | 0 | 1 | 0 | 0 | 0 | 0 | 0 | 0 | 0 |
| hsa-asg-13878_st2 | 0 | 0 | 0 | 1 | 0 | 0 | 0 | 0 | 0 | 0 | 0 |
| hsa-asg-13908_st2 | 0 | 0 | 0 | 0 | 0 | 0 | 0 | 0 | 0 | 0 | 0 |
| hsa-asg-13997_st2 | 0 | 0 | 1 | 0 | 0 | 0 | 0 | 0 | 0 | 0 | 0 |
| hsa-asg-14020_st2 | 0 | 0 | 0 | 0 | 0 | 0 | 1 | 0 | 0 | 0 | 0 |
| hsa-asg-14134_st1 | 0 | 0 | 0 | 0 | 0 | 0 | 0 | 0 | 0 | 0 | 0 |
| hsa-asg-14147_st1 | 0 | 0 | 0 | 0 | 0 | 0 | 0 | 0 | 0 | 0 | 0 |
| hsa-asg-14160_st1 | 0 | 0 | 0 | 0 | 0 | 0 | 0 | 0 | 0 | 0 | 0 |
| hsa-asg-14176_st1 | 0 | 0 | 0 | 0 | 0 | 0 | 0 | 0 | 0 | 0 | 0 |
| hsa-asg-14178_st2 | 0 | 0 | 0 | 0 | 0 | 0 | 1 | 0 | 0 | 0 | 0 |
| hsa-asg-14209_st1 | 0 | 0 | 0 | 1 | 0 | 0 | 0 | 0 | 0 | 0 | 0 |
| hsa-asg-1608_st2 | 0 | 0 | 0 | 1 | 0 | 0 | 0 | 0 | 0 | 0 | 0 |
| hsa-asg-1619_st2 | 0 | 0 | 0 | 1 | 0 | 0 | 0 | 0 | 0 | 0 | 0 |
| hsa-asg-1765_st1 | 0 | 0 | 0 | 0 | 0 | 0 | 0 | 1 | 0 | 0 | 0 |
| hsa-asg-1826_st2 | 0 | 0 | 0 | 0 | 0 | 0 | 0 | 1 | 0 | 0 | 0 |
| hsa-asg-1881_st2 | 0 | 0 | 0 | 1 | 0 | 0 | 0 | 0 | 0 | 0 | 0 |
| hsa-asg-2025_st2 | 0 | 0 | 0 | 0 | 0 | 0 | 0 | 0 | 0 | 0 | 0 |
| hsa-asg-20_st1 | 0 | 0 | 0 | 1 | 0 | 0 | 0 | 0 | 0 | 0 | 0 |
| hsa-asg-2303_st1 | 0 | 0 | 0 | 0 | 0 | 0 | 0 | 0 | 0 | 0 | 0 |
| hsa-asg-2364_st1 | 0 | 0 | 0 | 0 | 0 | 0 | 1 | 0 | 0 | 0 | 0 |
| hsa-asg-2381_st2 | 0 | 0 | 0 | 0 | 0 | 0 | 0 | 0 | 0 | 0 | 0 |
| hsa-asg-2637_st1 | 0 | 0 | 0 | 0 | 0 | 0 | 1 | 0 | 0 | 0 | 0 |
| hsa-asg-2845_st2 | 0 | 0 | 0 | 1 | 0 | 0 | 0 | 0 | 0 | 0 | 0 |
| hsa-asg-3009_st1 | 0 | 0 | 0 | 1 | 0 | 0 | 0 | 0 | 0 | 0 | 0 |
| hsa-asg-3185_st1 | 0 | 0 | 0 | 1 | 0 | 0 | 0 | 0 | 0 | 0 | 0 |
| hsa-asg-3322_st2 | 0 | 0 | 0 | 1 | 0 | 0 | 0 | 0 | 0 | 0 | 0 |
| hsa-asg-3373_st2 | 0 | 0 | 0 | 0 | 0 | 0 | 1 | 0 | 0 | 0 | 0 |
| hsa-asg-3376_st1 | 0 | 0 | 0 | 0 | 0 | 0 | 0 | 1 | 0 | 0 | 0 |
| hsa-asg-3406_st1 | 0 | 0 | 0 | 1 | 0 | 0 | 0 | 0 | 0 | 0 | 0 |
| hsa-asg-3473_st1 | 1 | 0 | 0 | 0 | 0 | 0 | 0 | 0 | 0 | 0 | 0 |
| hsa-asg-353_st1 | 0 | 0 | 0 | 0 | 0 | 0 | 0 | 0 | 0 | 0 | 0 |
| hsa-asg-3595_st1 | 0 | 0 | 0 | 0 | 0 | 0 | 0 | 0 | 0 | 0 | 1 |
| hsa-asg-3597_st2 | 0 | 0 | 0 | 1 | 0 | 0 | 0 | 0 | 0 | 0 | 0 |
| hsa-asg-3672_st1 | 0 | 0 | 0 | 1 | 0 | 0 | 0 | 0 | 0 | 0 | 0 |
| hsa-asg-3711_st2 | 0 | 0 | 0 | 0 | 0 | 0 | 0 | 0 | 1 | 0 | 0 |
| hsa-asg-3731_st1 | 0 | 0 | 0 | 1 | 0 | 0 | 0 | 0 | 0 | 0 | 0 |
| hsa-asg-3740_st1 | 0 | 0 | 0 | 1 | 0 | 0 | 0 | 0 | 0 | 0 | 0 |
| hsa-asg-3742_st1 | 0 | 0 | 0 | 1 | 0 | 0 | 0 | 0 | 0 | 0 | 0 |
| hsa-asg-3743_st1 | 0 | 0 | 0 | 1 | 0 | 0 | 0 | 0 | 0 | 0 | 0 |
| hsa-asg-3754_st2 | 0 | 0 | 0 | 1 | 0 | 0 | 0 | 0 | 0 | 0 | 0 |
| hsa-asg-3782_st1 | 0 | 0 | 0 | 1 | 0 | 0 | 0 | 0 | 0 | 0 | 0 |
| hsa-asg-3910_st2 | 0 | 0 | 0 | 0 | 0 | 0 | 0 | 0 | 0 | 0 | 0 |
| hsa-asg-3922_st2 | 0 | 0 | 0 | 0 | 0 | 0 | 0 | 0 | 0 | 0 | 0 |
| hsa-asg-3979_st1 | 0 | 0 | 1 | 0 | 0 | 0 | 0 | 0 | 0 | 0 | 0 |
| hsa-asg-3985_st1 | 0 | 0 | 0 | 0 | 0 | 0 | 1 | 0 | 0 | 0 | 0 |
| hsa-asg-4037_st1 | 0 | 0 | 0 | 1 | 0 | 0 | 0 | 0 | 0 | 0 | 0 |
| hsa-asg-4201_st1 | 0 | 0 | 0 | 0 | 0 | 0 | 1 | 0 | 0 | 0 | 0 |
| hsa-asg-4283_st2 | 0 | 0 | 0 | 1 | 0 | 0 | 0 | 0 | 0 | 0 | 0 |
| hsa-asg-4441_st1 | 0 | 1 | 0 | 0 | 0 | 0 | 0 | 0 | 0 | 0 | 0 |
| hsa-asg-4471_st1 | 0 | 0 | 0 | 0 | 0 | 0 | 1 | 0 | 0 | 0 | 0 |
| hsa-asg-4472_st2 | 0 | 0 | 0 | 1 | 0 | 0 | 0 | 0 | 0 | 0 | 0 |
| hsa-asg-4574_st2 | 0 | 0 | 0 | 0 | 0 | 0 | 1 | 0 | 0 | 0 | 0 |
| hsa-asg-4691_st1 | 0 | 0 | 0 | 0 | 0 | 0 | 0 | 0 | 0 | 0 | 1 |
| hsa-asg-4756_st2 | 0 | 0 | 0 | 1 | 0 | 0 | 0 | 0 | 0 | 0 | 0 |
| hsa-asg-4803_st2 | 0 | 0 | 0 | 0 | 0 | 0 | 0 | 0 | 0 | 0 | 0 |
| hsa-asg-4872_st1 | 0 | 0 | 0 | 1 | 0 | 0 | 0 | 0 | 0 | 0 | 0 |
| hsa-asg-4913_st1 | 0 | 0 | 0 | 0 | 0 | 0 | 0 | 0 | 0 | 0 | 0 |
| hsa-asg-5149_st2 | 0 | 0 | 0 | 1 | 0 | 0 | 0 | 0 | 0 | 0 | 0 |
| hsa-asg-5205_st1 | 0 | 0 | 0 | 1 | 0 | 0 | 0 | 0 | 0 | 0 | 0 |
| hsa-asg-5455_st2 | 0 | 0 | 0 | 0 | 0 | 0 | 1 | 0 | 0 | 0 | 0 |
| hsa-asg-558_st1 | 0 | 0 | 0 | 1 | 0 | 0 | 0 | 0 | 0 | 0 | 0 |
| hsa-asg-5606_st1 | 0 | 0 | 0 | 1 | 0 | 0 | 0 | 0 | 0 | 0 | 0 |
| hsa-asg-5618_st1 | 0 | 0 | 0 | 0 | 0 | 0 | 0 | 0 | 0 | 0 | 0 |
| hsa-asg-562_st1 | 0 | 0 | 0 | 0 | 0 | 0 | 0 | 0 | 0 | 0 | 0 |
| hsa-asg-5741_st2 | 0 | 0 | 0 | 1 | 0 | 0 | 0 | 0 | 0 | 0 | 0 |
| hsa-asg-5886_st2 | 0 | 0 | 1 | 0 | 0 | 0 | 0 | 0 | 0 | 0 | 0 |
| hsa-asg-5996_st2 | 0 | 0 | 0 | 1 | 0 | 0 | 0 | 0 | 0 | 0 | 0 |
| hsa-asg-6027_st2 | 0 | 0 | 0 | 0 | 0 | 0 | 0 | 0 | 0 | 0 | 1 |
| hsa-asg-6160_st1 | 0 | 0 | 0 | 0 | 0 | 0 | 0 | 0 | 0 | 0 | 0 |
| hsa-asg-6178_st2 | 1 | 0 | 0 | 0 | 0 | 0 | 0 | 0 | 0 | 0 | 0 |
| hsa-asg-6377_st2 | 0 | 0 | 0 | 0 | 0 | 0 | 0 | 0 | 0 | 0 | 1 |
| hsa-asg-6619_st1 | 0 | 0 | 0 | 1 | 0 | 0 | 0 | 0 | 0 | 0 | 0 |
| hsa-asg-6623_st2 | 1 | 0 | 0 | 0 | 0 | 0 | 0 | 0 | 0 | 0 | 0 |
| hsa-asg-6667_st1 | 0 | 0 | 0 | 0 | 0 | 0 | 1 | 0 | 0 | 0 | 0 |
| hsa-asg-677_st2 | 0 | 0 | 0 | 1 | 0 | 0 | 0 | 0 | 0 | 0 | 0 |
| hsa-asg-6815_st1 | 0 | 0 | 0 | 1 | 0 | 0 | 0 | 0 | 0 | 0 | 0 |
| hsa-asg-6838_st1 | 0 | 0 | 0 | 0 | 0 | 0 | 0 | 0 | 0 | 0 | 1 |
| hsa-asg-6845_st2 | 0 | 0 | 0 | 0 | 0 | 0 | 0 | 0 | 0 | 0 | 0 |
| hsa-asg-6880_st1 | 0 | 0 | 0 | 0 | 0 | 0 | 0 | 0 | 0 | 0 | 1 |
| hsa-asg-6890_st1 | 0 | 0 | 0 | 1 | 0 | 0 | 0 | 0 | 0 | 0 | 0 |
| hsa-asg-6915_st1 | 0 | 0 | 0 | 1 | 0 | 0 | 0 | 0 | 0 | 0 | 0 |
| hsa-asg-7159_st2 | 0 | 0 | 0 | 1 | 0 | 0 | 0 | 0 | 0 | 0 | 0 |
| hsa-asg-7388_st1 | 0 | 0 | 0 | 1 | 0 | 0 | 0 | 0 | 0 | 0 | 0 |
| hsa-asg-7465_st2 | 0 | 0 | 0 | 0 | 0 | 0 | 1 | 0 | 0 | 0 | 0 |
| hsa-asg-7527_st2 | 0 | 0 | 0 | 1 | 0 | 0 | 0 | 0 | 0 | 0 | 0 |
| hsa-asg-7615_st2 | 0 | 0 | 0 | 0 | 0 | 0 | 0 | 0 | 0 | 0 | 0 |
| hsa-asg-7671_st1 | 0 | 0 | 0 | 1 | 0 | 0 | 0 | 0 | 0 | 0 | 0 |
| hsa-asg-7751_st2 | 0 | 0 | 0 | 1 | 0 | 0 | 0 | 0 | 0 | 0 | 0 |
| hsa-asg-7846_st1 | 0 | 0 | 0 | 0 | 0 | 0 | 0 | 0 | 0 | 0 | 1 |
| hsa-asg-791_st1 | 0 | 0 | 0 | 0 | 0 | 0 | 0 | 1 | 0 | 0 | 0 |
| hsa-asg-8039_st2 | 0 | 0 | 0 | 1 | 0 | 0 | 0 | 0 | 0 | 0 | 0 |
| hsa-asg-8067_st2 | 0 | 0 | 0 | 0 | 0 | 1 | 0 | 0 | 0 | 0 | 0 |
| hsa-asg-8129_st2 | 0 | 0 | 0 | 1 | 0 | 0 | 0 | 0 | 0 | 0 | 0 |
| hsa-asg-8138_st2 | 0 | 0 | 0 | 1 | 0 | 0 | 0 | 0 | 0 | 0 | 0 |
| hsa-asg-8242_st2 | 0 | 0 | 0 | 1 | 0 | 0 | 0 | 0 | 0 | 0 | 0 |
| hsa-asg-8293_st2 | 0 | 0 | 0 | 1 | 0 | 0 | 0 | 0 | 0 | 0 | 0 |
| hsa-asg-8329_st1 | 0 | 0 | 0 | 1 | 0 | 0 | 0 | 0 | 0 | 0 | 0 |
| hsa-asg-8330_st2 | 0 | 0 | 0 | 0 | 0 | 0 | 0 | 0 | 0 | 0 | 1 |
| hsa-asg-8411_st2 | 0 | 0 | 0 | 0 | 0 | 0 | 0 | 0 | 0 | 0 | 0 |
| hsa-asg-8486_st2 | 0 | 0 | 0 | 1 | 0 | 0 | 0 | 0 | 0 | 0 | 0 |
| hsa-asg-8630_st2 | 0 | 0 | 0 | 1 | 0 | 0 | 0 | 0 | 0 | 0 | 0 |
| hsa-asg-8893_st1 | 0 | 0 | 0 | 1 | 0 | 0 | 0 | 0 | 0 | 0 | 0 |
| hsa-asg-8987_st1 | 0 | 0 | 0 | 1 | 0 | 0 | 0 | 0 | 0 | 0 | 0 |
| hsa-asg-9009_st1 | 0 | 0 | 0 | 1 | 0 | 0 | 0 | 0 | 0 | 0 | 0 |
| hsa-asg-9303_st2 | 0 | 0 | 0 | 0 | 0 | 0 | 1 | 0 | 0 | 0 | 0 |
| hsa-asg-9365_st2 | 0 | 0 | 0 | 0 | 0 | 0 | 1 | 0 | 0 | 0 | 0 |
| hsa-asg-9491_st1 | 0 | 0 | 0 | 1 | 0 | 0 | 0 | 0 | 0 | 0 | 0 |
| hsa-asg-9510_st1 | 0 | 0 | 0 | 1 | 0 | 0 | 0 | 0 | 0 | 0 | 0 |
| hsa-asg-9512_st1 | 0 | 0 | 0 | 1 | 0 | 0 | 0 | 0 | 0 | 0 | 0 |
| hsa-asg-9663_st1 | 0 | 0 | 0 | 0 | 0 | 0 | 0 | 0 | 0 | 0 | 0 |
| hsa-asg-9757_st1 | 0 | 0 | 0 | 0 | 0 | 0 | 1 | 0 | 0 | 0 | 0 |
| hsa-asg-9939_st2 | 0 | 0 | 0 | 0 | 0 | 0 | 0 | 0 | 0 | 0 | 1 |
| hsa-asg-9971_st2 | 0 | 0 | 0 | 0 | 0 | 0 | 1 | 0 | 0 | 0 | 0 |
| hsa-cand330_st2 | 0 | 0 | 0 | 1 | 0 | 0 | 0 | 0 | 0 | 0 | 0 |
| hsa-cand443_st2 | 0 | 0 | 0 | 1 | 0 | 0 | 0 | 0 | 0 | 0 | 0 |
| hsa-cand561_st1 | 0 | 0 | 0 | 1 | 0 | 0 | 0 | 0 | 0 | 0 | 0 |
| hsa-cand660_st1 | 0 | 0 | 0 | 0 | 0 | 0 | 1 | 0 | 0 | 0 | 0 |
| hsa-cand733_st1 | 0 | 0 | 0 | 1 | 0 | 0 | 0 | 0 | 0 | 0 | 0 |
| hsa-cand852_st2 | 0 | 0 | 0 | 0 | 0 | 0 | 0 | 0 | 0 | 0 | 0 |
| hsa-cand91_st1 | 0 | 0 | 0 | 1 | 0 | 0 | 0 | 0 | 0 | 0 | 0 |
| hsa-cand930_st1 | 0 | 0 | 0 | 1 | 0 | 0 | 0 | 0 | 0 | 0 | 0 |
| hsa-miR-101_st1 | 0 | 0 | 0 | 0 | 0 | 0 | 0 | 0 | 0 | 0 | 0 |
| hsa-miR-122a_st1 | 0 | 0 | 0 | 0 | 0 | 0 | 0 | 0 | 0 | 0 | 0 |
| hsa-miR-128a_st2 | 0 | 0 | 0 | 0 | 0 | 0 | 1 | 0 | 0 | 0 | 0 |
| hsa-miR-128b_st1 | 0 | 0 | 0 | 0 | 0 | 0 | 1 | 0 | 0 | 0 | 0 |
| hsa-miR-129_st1 | 0 | 0 | 0 | 0 | 0 | 0 | 1 | 0 | 0 | 0 | 0 |
| hsa-miR-135b_st2 | 0 | 0 | 0 | 1 | 0 | 0 | 0 | 0 | 0 | 0 | 0 |
| hsa-miR-137_st1 | 0 | 0 | 0 | 0 | 0 | 0 | 1 | 0 | 0 | 0 | 0 |
| hsa-miR-138_st1 | 0 | 0 | 0 | 0 | 0 | 0 | 1 | 0 | 0 | 0 | 0 |
| hsa-miR-153_st2 | 0 | 0 | 0 | 0 | 0 | 0 | 1 | 0 | 0 | 0 | 0 |
| hsa-miR-193b_st1 | 0 | 0 | 0 | 0 | 0 | 0 | 0 | 0 | 0 | 0 | 0 |
| hsa-miR-196b_st2 | 0 | 0 | 0 | 0 | 0 | 0 | 0 | 0 | 0 | 0 | 0 |
| hsa-miR-199b_st2 | 0 | 0 | 0 | 0 | 0 | 0 | 0 | 0 | 0 | 0 | 0 |
| hsa-miR-19a_st1 | 0 | 0 | 0 | 0 | 0 | 0 | 0 | 0 | 0 | 0 | 0 |
| hsa-miR-1_st1 | 0 | 0 | 0 | 0 | 0 | 0 | 0 | 0 | 0 | 0 | 0 |
| hsa-miR-202_st1 | 0 | 0 | 0 | 1 | 0 | 0 | 0 | 0 | 0 | 0 | 0 |
| hsa-miR-212_st2 | 0 | 0 | 0 | 0 | 0 | 0 | 1 | 0 | 0 | 0 | 0 |
| hsa-miR-216_st2 | 0 | 0 | 0 | 0 | 0 | 0 | 0 | 0 | 0 | 0 | 0 |
| hsa-miR-217_st1 | 0 | 0 | 0 | 0 | 0 | 0 | 0 | 0 | 0 | 0 | 0 |
| hsa-miR-218_st2 | 0 | 0 | 0 | 0 | 0 | 0 | 0 | 0 | 0 | 0 | 0 |
| hsa-miR-224_st2 | 0 | 0 | 0 | 0 | 0 | 0 | 0 | 0 | 0 | 0 | 0 |
| hsa-miR-299-3p_st2 | 0 | 0 | 0 | 1 | 0 | 0 | 0 | 0 | 0 | 0 | 0 |
| hsa-miR-323_st1 | 0 | 0 | 0 | 0 | 0 | 0 | 1 | 0 | 0 | 0 | 0 |
| hsa-miR-330_st2 | 0 | 0 | 0 | 0 | 0 | 0 | 1 | 0 | 0 | 0 | 0 |
| hsa-miR-346_st1 | 0 | 0 | 0 | 0 | 0 | 0 | 1 | 0 | 0 | 0 | 0 |
| hsa-miR-370_st1 | 0 | 0 | 0 | 0 | 0 | 0 | 1 | 0 | 0 | 0 | 0 |
| hsa-miR-377_st1 | 0 | 0 | 0 | 1 | 0 | 0 | 0 | 0 | 0 | 0 | 0 |
| hsa-miR-452-_st1 | 0 | 0 | 0 | 0 | 0 | 0 | 0 | 0 | 0 | 0 | 0 |
| hsa-miR-452_st1 | 0 | 0 | 0 | 0 | 0 | 0 | 0 | 0 | 0 | 0 | 0 |
| hsa-miR-455_st1 | 0 | 0 | 0 | 0 | 0 | 0 | 0 | 0 | 0 | 0 | 0 |
| hsa-miR-483_st1 | 0 | 0 | 0 | 0 | 0 | 0 | 0 | 0 | 0 | 0 | 0 |
| hsa-miR-489_st2 | 0 | 1 | 0 | 0 | 0 | 0 | 0 | 0 | 0 | 0 | 0 |
| hsa-miR-491_st1 | 0 | 0 | 0 | 0 | 0 | 0 | 1 | 0 | 0 | 0 | 0 |
| hsa-miR-493-3p_st1 | 0 | 0 | 0 | 0 | 0 | 0 | 0 | 0 | 0 | 0 | 0 |
| hsa-miR-499_st1 | 0 | 0 | 0 | 0 | 0 | 0 | 0 | 0 | 0 | 0 | 0 |
| hsa-miR-506_st2 | 0 | 0 | 0 | 1 | 0 | 0 | 0 | 0 | 0 | 0 | 0 |
| hsa-miR-510_st2 | 0 | 0 | 0 | 1 | 0 | 0 | 0 | 0 | 0 | 0 | 0 |
| hsa-miR-514_st1 | 0 | 0 | 0 | 1 | 0 | 0 | 0 | 0 | 0 | 0 | 0 |
| hsa-miR-515-3p_st2 | 0 | 0 | 0 | 1 | 0 | 0 | 0 | 0 | 0 | 0 | 0 |
| hsa-miR-517a_st1 | 0 | 0 | 0 | 1 | 0 | 0 | 0 | 0 | 0 | 0 | 0 |
| hsa-miR-517b_st1 | 0 | 0 | 0 | 0 | 0 | 0 | 0 | 0 | 0 | 0 | 0 |
| hsa-miR-517c_st2 | 0 | 0 | 0 | 0 | 0 | 0 | 0 | 1 | 0 | 0 | 0 |
| hsa-miR-518f-_st2 | 0 | 0 | 0 | 1 | 0 | 0 | 0 | 0 | 0 | 0 | 0 |
| hsa-miR-519d_st1 | 0 | 0 | 0 | 1 | 0 | 0 | 0 | 0 | 0 | 0 | 0 |
| hsa-miR-520a-_st2 | 0 | 0 | 0 | 1 | 0 | 0 | 0 | 0 | 0 | 0 | 0 |
| hsa-miR-520c_st2 | 0 | 0 | 0 | 1 | 0 | 0 | 0 | 0 | 0 | 0 | 0 |
| hsa-miR-520g_st1 | 0 | 0 | 0 | 1 | 0 | 0 | 0 | 0 | 0 | 0 | 0 |
| hsa-miR-520h_st1 | 0 | 0 | 0 | 1 | 0 | 0 | 0 | 0 | 0 | 0 | 0 |
| hsa-miR-525_st2 | 0 | 0 | 0 | 1 | 0 | 0 | 0 | 0 | 0 | 0 | 0 |
| hsa-miR-526a_st2 | 0 | 0 | 0 | 1 | 0 | 0 | 0 | 0 | 0 | 0 | 0 |
| hsa-miR-526b_st2 | 0 | 0 | 0 | 1 | 0 | 0 | 0 | 0 | 0 | 0 | 0 |
| hsa-miR-526c_st1 | 0 | 0 | 0 | 1 | 0 | 0 | 0 | 0 | 0 | 0 | 0 |
| hsa-miR-542-3p_st1 | 0 | 0 | 0 | 0 | 0 | 1 | 0 | 0 | 0 | 0 | 0 |
| hsa-miR-572_st1 | 0 | 0 | 0 | 1 | 0 | 0 | 0 | 0 | 0 | 0 | 0 |
| hsa-miR-577_st1 | 0 | 0 | 0 | 0 | 0 | 0 | 1 | 0 | 0 | 0 | 0 |
| hsa-miR-584_st2 | 0 | 0 | 0 | 0 | 0 | 0 | 1 | 0 | 0 | 0 | 0 |
| hsa-miR-598_st2 | 0 | 0 | 0 | 0 | 0 | 0 | 1 | 0 | 0 | 0 | 0 |
| hsa-miR-608_st2 | 0 | 0 | 0 | 1 | 0 | 0 | 0 | 0 | 0 | 0 | 0 |
| hsa-miR140_st1 | 0 | 0 | 0 | 0 | 0 | 0 | 0 | 0 | 0 | 0 | 1 |
| hsa-miR141_st1 | 0 | 0 | 0 | 0 | 0 | 0 | 0 | 0 | 0 | 0 | 0 |
| hsa-miR154_st1 | 0 | 0 | 0 | 0 | 0 | 0 | 0 | 0 | 0 | 0 | 0 |
| hsa-miR157_st2 | 0 | 0 | 0 | 0 | 0 | 0 | 0 | 0 | 0 | 0 | 0 |
| hsa-miR167_st2 | 0 | 0 | 0 | 0 | 0 | 0 | 0 | 0 | 0 | 0 | 0 |
| hsa-miR177_st1 | 0 | 0 | 0 | 0 | 0 | 0 | 0 | 1 | 0 | 0 | 0 |
| hsa-miR206_st1 | 0 | 0 | 0 | 0 | 0 | 0 | 0 | 0 | 0 | 0 | 1 |
| hsa-miR223_st2 | 0 | 0 | 0 | 1 | 0 | 0 | 0 | 0 | 0 | 0 | 0 |

| Probe ID | CRX | CO | BRS | BLD | ESO | LIV | OVR | PRO | LUN | PAN | SUM |
|---|---|---|---|---|---|---|---|---|---|---|---|
| hsa-miR-200a_st2 | 1 | 1 | 1 | 1 | 1 | 0 | 0 | 1 | 1 | 1 | 15 |
| hsa-miR-200b_st1 | 1 | 1 | 1 | 1 | 1 | 0 | 0 | 1 | 1 | 1 | 15 |
| hsa-miR-200c_st1 | 1 | 1 | 1 | 1 | 1 | 0 | 0 | 1 | 1 | 1 | 15 |
| hsa-miR-429_st1 | 1 | 1 | 1 | 1 | 1 | 0 | 0 | 1 | 1 | 1 | 15 |
| hsa-miR-605_st1 | 1 | 1 | 0 | 1 | 1 | 0 | 0 | 1 | 1 | 1 | 14 |
| hsa-miR-187_st1 | 1 | 1 | 0 | 1 | 1 | 0 | 0 | 1 | 1 | 0 | 13 |
| hsa-asg-7637_st2 | 1 | 1 | 0 | 0 | 1 | 0 | 0 | 1 | 1 | 1 | 12 |
| hsa-miR-203_st2 | 1 | 1 | 0 | 1 | 1 | 0 | 0 | 1 | 1 | 0 | 12 |
| hsa-miR-375_st1 | 1 | 1 | 0 | 0 | 1 | 1 | 0 | 1 | 1 | 1 | 12 |
| hsa-miR-411_st1 | 1 | 0 | 1 | 1 | 0 | 0 | 1 | 0 | 0 | 1 | 12 |
| hsa-miR-487b_st2 | 1 | 0 | 1 | 1 | 0 | 0 | 1 | 1 | 0 | 1 | 12 |
| hsa-asg-14153_st2 | 1 | 1 | 0 | 1 | 1 | 0 | 0 | 1 | 0 | 1 | 11 |
| hsa-asg-5021_st1 | 1 | 0 | 1 | 1 | 0 | 0 | 1 | 1 | 0 | 1 | 11 |
| hsa-miR-368_st2 | 1 | 0 | 1 | 1 | 0 | 0 | 1 | 0 | 0 | 1 | 11 |
| hsa-miR-493-5p_st1 | 1 | 0 | 0 | 1 | 0 | 0 | 1 | 1 | 0 | 1 | 11 |
| hsa-miR-495_st1 | 1 | 0 | 0 | 1 | 0 | 0 | 1 | 1 | 0 | 0 | 11 |
| hsa-miR-141_st1 | 0 | 1 | 0 | 0 | 0 | 0 | 0 | 1 | 1 | 1 | 10 |
| hsa-miR-154_st2 | 1 | 0 | 0 | 1 | 0 | 0 | 1 | 0 | 0 | 1 | 10 |
| hsa-miR-205_st1 | 1 | 0 | 1 | 1 | 1 | 0 | 0 | 1 | 1 | 0 | 10 |
| hsa-miR-381_st2 | 1 | 0 | 0 | 1 | 0 | 0 | 1 | 0 | 0 | 1 | 10 |
| hsa-asg-11715_st2 | 0 | 1 | 0 | 0 | 0 | 0 | 0 | 0 | 0 | 1 | 9 |
| hsa-asg-13254_st1 | 1 | 0 | 0 | 1 | 0 | 0 | 1 | 0 | 0 | 0 | 9 |
| hsa-asg-13404_st2 | 1 | 0 | 0 | 0 | 0 | 0 | 1 | 0 | 0 | 1 | 9 |
| hsa-asg-924_st1 | 0 | 1 | 0 | 1 | 1 | 0 | 0 | 0 | 0 | 0 | 9 |
| hsa-asg-5617_st1 | 1 | 0 | 0 | 1 | 0 | 0 | 1 | 0 | 0 | 0 | 8 |
| hsa-miR-539_st1 | 1 | 0 | 1 | 0 | 0 | 0 | 1 | 0 | 0 | 1 | 8 |
| hsa-miR202_st2 | 1 | 0 | 0 | 0 | 0 | 0 | 1 | 0 | 0 | 1 | 8 |
| hsa-asg-10049_st1 | 0 | 0 | 1 | 0 | 0 | 0 | 1 | 0 | 0 | 0 | 7 |
| hsa-miR-127_st1 | 1 | 0 | 0 | 0 | 0 | 0 | 1 | 0 | 0 | 0 | 7 |
| hsa-miR-133a_st1 | 1 | 0 | 0 | 1 | 1 | 0 | 0 | 1 | 0 | 0 | 7 |
| hsa-miR-133b_st2 | 1 | 1 | 0 | 1 | 1 | 0 | 0 | 1 | 0 | 0 | 7 |
| hsa-miR-299-5p_st2 | 1 | 0 | 0 | 1 | 0 | 0 | 1 | 0 | 0 | 0 | 7 |
| hsa-miR-432_st2 | 1 | 0 | 1 | 0 | 0 | 0 | 1 | 0 | 0 | 1 | 7 |
| hsa-asg-10131_st2 | 0 | 1 | 0 | 0 | 0 | 0 | 0 | 0 | 1 | 1 | 6 |
| hsa-asg-14182_st1 | 0 | 1 | 0 | 0 | 0 | 1 | 0 | 0 | 0 | 1 | 6 |
| hsa-asg-7472_st2 | 0 | 0 | 0 | 0 | 0 | 0 | 1 | 0 | 0 | 1 | 6 |
| hsa-cand206_st1 | 1 | 0 | 0 | 0 | 0 | 0 | 1 | 0 | 0 | 0 | 6 |
| hsa-miR-204_st2 | 1 | 0 | 0 | 0 | 0 | 0 | 1 | 0 | 0 | 0 | 6 |
| hsa-miR-215_st1 | 0 | 1 | 0 | 0 | 0 | 1 | 0 | 0 | 0 | 1 | 6 |
| hsa-miR-383_st1 | 0 | 0 | 0 | 0 | 0 | 0 | 1 | 0 | 0 | 0 | 6 |
| hsa-miR-424_st1 | 1 | 0 | 0 | 0 | 0 | 0 | 1 | 0 | 0 | 0 | 6 |
| hsa-asg-13166_st2 | 1 | 0 | 0 | 0 | 0 | 0 | 1 | 0 | 0 | 0 | 5 |
| hsa-miR-134_st2 | 1 | 0 | 0 | 0 | 0 | 0 | 1 | 0 | 0 | 0 | 5 |
| hsa-miR-192_st2 | 0 | 1 | 0 | 0 | 0 | 1 | 0 | 0 | 0 | 1 | 5 |
| hsa-miR-194_st2 | 0 | 1 | 0 | 0 | 0 | 1 | 0 | 0 | 0 | 0 | 5 |
| hsa-miR-206_st2 | 0 | 0 | 0 | 1 | 1 | 0 | 0 | 1 | 0 | 0 | 5 |
| hsa-miR-338_st1 | 0 | 0 | 0 | 0 | 1 | 0 | 0 | 0 | 1 | 1 | 5 |
| hsa-miR-379_st1 | 1 | 0 | 0 | 0 | 0 | 0 | 1 | 0 | 0 | 0 | 5 |
| hsa-miR-410_st1 | 0 | 0 | 0 | 0 | 0 | 0 | 1 | 0 | 0 | 1 | 5 |
| hsa-miR-542-5p_st2 | 1 | 0 | 0 | 0 | 0 | 0 | 1 | 0 | 0 | 0 | 5 |
| hsa-asg-12139_st2 | 0 | 0 | 0 | 0 | 0 | 0 | 0 | 0 | 0 | 1 | 4 |
| hsa-asg-12227_st1 | 0 | 1 | 0 | 0 | 0 | 0 | 0 | 0 | 0 | 0 | 4 |
| hsa-asg-13705_st1 | 0 | 0 | 0 | 0 | 0 | 0 | 0 | 0 | 0 | 1 | 4 |
| hsa-asg-2027_st1 | 0 | 0 | 0 | 1 | 1 | 0 | 0 | 0 | 0 | 0 | 4 |
| hsa-asg-2345_st2 | 0 | 0 | 0 | 1 | 1 | 0 | 0 | 0 | 0 | 0 | 4 |
| hsa-asg-8428_st2 | 0 | 0 | 0 | 0 | 1 | 0 | 0 | 0 | 1 | 0 | 4 |
| hsa-miR-184_st1 | 0 | 0 | 0 | 0 | 0 | 0 | 0 | 0 | 1 | 0 | 4 |
| hsa-miR-189_st1 | 1 | 0 | 0 | 1 | 1 | 0 | 0 | 0 | 0 | 0 | 4 |
| hsa-miR-200a-_st2 | 0 | 1 | 0 | 0 | 0 | 0 | 0 | 0 | 0 | 0 | 4 |
| hsa-miR-34c_st2 | 0 | 0 | 0 | 0 | 0 | 0 | 0 | 0 | 1 | 0 | 4 |
| hsa-miR-376a_st2 | 1 | 0 | 0 | 1 | 0 | 0 | 1 | 0 | 0 | 0 | 4 |
| hsa-miR-376b_st1 | 0 | 0 | 0 | 0 | 0 | 0 | 1 | 0 | 0 | 0 | 4 |
| hsa-miR-382_st1 | 1 | 0 | 0 | 0 | 0 | 0 | 1 | 0 | 0 | 0 | 4 |
| hsa-miR-409-3p_st1 | 1 | 0 | 0 | 0 | 0 | 0 | 0 | 0 | 0 | 0 | 4 |
| hsa-miR-485-5p_st2 | 1 | 0 | 0 | 0 | 0 | 0 | 1 | 0 | 0 | 0 | 4 |
| hsa-miR-592_st1 | 0 | 0 | 0 | 1 | 0 | 0 | 1 | 0 | 0 | 0 | 4 |
| hsa-miR-96_st1 | 0 | 0 | 0 | 0 | 0 | 0 | 0 | 1 | 0 | 1 | 4 |
| hsa-miR-9_st2 | 1 | 0 | 0 | 0 | 0 | 0 | 0 | 0 | 0 | 0 | 4 |
| hsa-miR23_st2 | 0 | 0 | 0 | 0 | 0 | 0 | 1 | 0 | 0 | 0 | 4 |
| hsa-asg-1088_st1 | 0 | 0 | 0 | 0 | 0 | 0 | 0 | 0 | 0 | 0 | 3 |
| hsa-asg-11443_st1 | 0 | 0 | 0 | 0 | 0 | 0 | 1 | 0 | 0 | 0 | 3 |
| hsa-asg-1296_st1 | 0 | 0 | 0 | 0 | 0 | 0 | 0 | 0 | 0 | 1 | 3 |
| hsa-asg-14208_st1 | 0 | 0 | 0 | 0 | 0 | 1 | 0 | 0 | 0 | 0 | 3 |
| hsa-asg-14228_st2 | 0 | 0 | 0 | 0 | 0 | 0 | 1 | 0 | 0 | 0 | 3 |
| hsa-asg-1521_st1 | 0 | 0 | 0 | 0 | 0 | 0 | 0 | 0 | 0 | 0 | 3 |
| hsa-asg-1794_st1 | 0 | 0 | 0 | 0 | 1 | 0 | 0 | 0 | 1 | 0 | 3 |
| hsa-asg-4915_st1 | 0 | 0 | 0 | 0 | 0 | 0 | 0 | 1 | 0 | 0 | 3 |
| hsa-asg-4978_st2 | 0 | 0 | 0 | 0 | 0 | 0 | 0 | 0 | 0 | 0 | 3 |
| hsa-asg-5119_st1 | 0 | 0 | 0 | 0 | 0 | 0 | 0 | 0 | 0 | 1 | 3 |
| hsa-asg-5638_st2 | 0 | 0 | 0 | 0 | 0 | 0 | 1 | 0 | 0 | 0 | 3 |
| hsa-asg-8128_st1 | 0 | 0 | 0 | 0 | 0 | 1 | 0 | 0 | 0 | 1 | 3 |
| hsa-asg-9696_st1 | 1 | 0 | 0 | 0 | 0 | 0 | 1 | 0 | 0 | 0 | 3 |
| hsa-cand150_st2 | 0 | 0 | 0 | 0 | 0 | 0 | 0 | 0 | 1 | 0 | 3 |
| hsa-miR-132_st1 | 1 | 0 | 0 | 0 | 0 | 0 | 0 | 0 | 0 | 0 | 3 |
| hsa-miR-149_st2 | 0 | 0 | 0 | 0 | 0 | 0 | 0 | 1 | 0 | 0 | 3 |
| hsa-miR-31_st2 | 0 | 0 | 0 | 1 | 0 | 0 | 0 | 0 | 0 | 0 | 3 |
| hsa-miR-369-5p_st2 | 1 | 0 | 0 | 0 | 0 | 0 | 1 | 0 | 0 | 0 | 3 |
| hsa-miR-433_st2 | 0 | 0 | 0 | 0 | 0 | 0 | 1 | 0 | 0 | 0 | 3 |
| hsa-miR-449_st2 | 0 | 0 | 0 | 0 | 0 | 0 | 0 | 0 | 1 | 0 | 3 |
| hsa-miR-450_st2 | 1 | 0 | 0 | 0 | 0 | 0 | 0 | 0 | 0 | 0 | 3 |
| hsa-miR-582_st1 | 0 | 0 | 0 | 1 | 0 | 0 | 0 | 0 | 0 | 0 | 3 |
| hsa-miR-9-_st2 | 1 | 0 | 0 | 0 | 0 | 0 | 0 | 0 | 0 | 0 | 3 |
| hsa-miR12_st1 | 0 | 0 | 0 | 0 | 1 | 0 | 0 | 0 | 0 | 0 | 3 |
| hsa-miR144_st2 | 0 | 0 | 0 | 0 | 0 | 0 | 1 | 0 | 0 | 0 | 3 |
| hsa-asg-10080_st1 | 0 | 0 | 0 | 0 | 0 | 0 | 0 | 0 | 0 | 1 | 2 |
| hsa-asg-10202_st2 | 0 | 0 | 0 | 1 | 0 | 0 | 0 | 0 | 0 | 0 | 2 |
| hsa-asg-10247_st1 | 0 | 0 | 0 | 0 | 0 | 0 | 0 | 0 | 0 | 1 | 2 |
| hsa-asg-10309_st1 | 0 | 0 | 0 | 0 | 0 | 0 | 0 | 0 | 0 | 0 | 2 |
| hsa-asg-10393_st1 | 0 | 0 | 0 | 0 | 0 | 0 | 0 | 0 | 0 | 0 | 2 |
| hsa-asg-10881_st1 | 0 | 0 | 0 | 0 | 0 | 0 | 0 | 0 | 0 | 0 | 2 |
| hsa-asg-10883_st1 | 1 | 0 | 0 | 0 | 0 | 0 | 1 | 0 | 0 | 0 | 2 |
| hsa-asg-11088_st1 | 0 | 0 | 0 | 0 | 0 | 0 | 0 | 0 | 0 | 1 | 2 |
| hsa-asg-11338_st2 | 0 | 0 | 0 | 0 | 0 | 0 | 1 | 0 | 0 | 0 | 2 |
| hsa-asg-13135_st1 | 0 | 0 | 0 | 0 | 0 | 0 | 0 | 0 | 0 | 0 | 2 |
| hsa-asg-13231_st1 | 0 | 0 | 0 | 0 | 0 | 0 | 0 | 0 | 1 | 0 | 2 |
| hsa-asg-13284_st1 | 0 | 0 | 0 | 1 | 0 | 0 | 0 | 0 | 0 | 0 | 2 |
| hsa-asg-13922_st1 | 0 | 0 | 1 | 0 | 0 | 0 | 0 | 0 | 0 | 0 | 2 |
| hsa-asg-14065_st2 | 0 | 0 | 0 | 0 | 0 | 0 | 0 | 0 | 0 | 0 | 2 |
| hsa-asg-2399_st2 | 0 | 0 | 0 | 0 | 0 | 0 | 0 | 0 | 0 | 0 | 2 |
| hsa-asg-2424_st1 | 0 | 0 | 0 | 0 | 0 | 0 | 0 | 0 | 0 | 0 | 2 |
| hsa-asg-2484_st2 | 0 | 0 | 0 | 0 | 0 | 0 | 0 | 0 | 0 | 0 | 2 |
| hsa-asg-3081_st1 | 0 | 0 | 0 | 0 | 0 | 0 | 0 | 0 | 0 | 0 | 2 |
| hsa-asg-3822_st2 | 0 | 0 | 0 | 0 | 0 | 0 | 0 | 0 | 0 | 1 | 2 |
| hsa-asg-3983_st1 | 0 | 0 | 1 | 0 | 0 | 0 | 0 | 0 | 0 | 0 | 2 |
| hsa-asg-4209_st2 | 0 | 0 | 1 | 0 | 0 | 0 | 0 | 0 | 0 | 0 | 2 |
| hsa-asg-4219_st1 | 0 | 0 | 0 | 0 | 0 | 0 | 0 | 0 | 0 | 0 | 2 |
| hsa-asg-4438_st2 | 0 | 0 | 0 | 0 | 0 | 0 | 0 | 0 | 1 | 0 | 2 |
| hsa-asg-4439_st2 | 0 | 0 | 0 | 0 | 0 | 0 | 0 | 0 | 1 | 0 | 2 |
| hsa-asg-5602_st2 | 0 | 0 | 0 | 1 | 1 | 0 | 0 | 0 | 0 | 0 | 2 |
| hsa-asg-5630_st2 | 0 | 0 | 0 | 0 | 0 | 0 | 1 | 0 | 0 | 0 | 2 |
| hsa-asg-6283_st1 | 0 | 0 | 0 | 0 | 0 | 0 | 0 | 0 | 0 | 0 | 2 |
| hsa-asg-7295_st2 | 0 | 0 | 0 | 0 | 0 | 0 | 0 | 0 | 0 | 0 | 2 |
| hsa-asg-8480_st1 | 0 | 0 | 0 | 0 | 0 | 0 | 0 | 0 | 0 | 0 | 2 |
| hsa-asg-8616_st2 | 0 | 0 | 0 | 0 | 0 | 0 | 0 | 0 | 0 | 1 | 2 |
| hsa-asg-9198_st1 | 0 | 0 | 0 | 0 | 1 | 0 | 0 | 0 | 0 | 0 | 2 |
| hsa-asg-9219_st2 | 0 | 0 | 0 | 0 | 0 | 0 | 0 | 0 | 0 | 1 | 2 |
| hsa-asg-9262_st1 | 0 | 0 | 0 | 0 | 0 | 0 | 0 | 0 | 0 | 0 | 2 |
| hsa-asg-9269_st2 | 0 | 0 | 0 | 0 | 0 | 0 | 0 | 0 | 1 | 0 | 2 |
| hsa-asg-9514_st1 | 0 | 0 | 0 | 0 | 0 | 0 | 0 | 0 | 0 | 0 | 2 |
| hsa-asg-9687_st1 | 1 | 0 | 0 | 0 | 0 | 0 | 1 | 0 | 0 | 0 | 2 |
| hsa-asg-9830_st2 | 0 | 0 | 0 | 0 | 0 | 0 | 0 | 0 | 0 | 1 | 2 |
| hsa-cand14_st1 | 0 | 0 | 0 | 0 | 0 | 0 | 0 | 0 | 0 | 0 | 2 |
| hsa-cand26_st2 | 0 | 0 | 0 | 0 | 0 | 0 | 0 | 0 | 0 | 0 | 2 |
| hsa-cand317_st1 | 0 | 0 | 0 | 0 | 0 | 0 | 0 | 0 | 0 | 0 | 2 |
| hsa-cand79_st1 | 0 | 0 | 0 | 0 | 0 | 0 | 0 | 0 | 0 | 0 | 2 |
| hsa-miR-105_st1 | 0 | 0 | 0 | 0 | 0 | 0 | 0 | 0 | 0 | 0 | 2 |
| hsa-miR-139_st2 | 0 | 0 | 0 | 0 | 0 | 0 | 0 | 0 | 0 | 0 | 2 |
| hsa-miR-154-_st2 | 0 | 0 | 0 | 0 | 0 | 0 | 0 | 0 | 0 | 0 | 2 |
| hsa-miR-182_st1 | 0 | 0 | 0 | 0 | 0 | 0 | 0 | 0 | 0 | 1 | 2 |
| hsa-miR-183_st1 | 0 | 0 | 0 | 0 | 0 | 0 | 0 | 0 | 0 | 1 | 2 |
| hsa-miR-328_st1 | 0 | 0 | 0 | 0 | 0 | 0 | 1 | 0 | 0 | 0 | 2 |
| hsa-miR-329_st1 | 1 | 0 | 0 | 0 | 0 | 0 | 0 | 0 | 0 | 0 | 2 |
| hsa-miR-378_st1 | 0 | 0 | 0 | 1 | 0 | 0 | 0 | 0 | 0 | 0 | 2 |
| hsa-miR-380-3p_st2 | 0 | 0 | 0 | 0 | 0 | 0 | 0 | 0 | 0 | 0 | 2 |
| hsa-miR-409-5p_st1 | 0 | 0 | 0 | 0 | 0 | 0 | 0 | 0 | 0 | 0 | 2 |
| hsa-miR-449b_st1 | 0 | 0 | 0 | 0 | 0 | 0 | 0 | 0 | 0 | 0 | 2 |
| hsa-miR-487a_st2 | 0 | 0 | 0 | 0 | 0 | 0 | 0 | 0 | 0 | 0 | 2 |
| hsa-miR-494_st1 | 1 | 0 | 0 | 0 | 0 | 0 | 0 | 0 | 0 | 0 | 2 |
| hsa-miR-503_st1 | 1 | 0 | 0 | 0 | 0 | 0 | 0 | 0 | 0 | 0 | 2 |
| hsa-miR-508_st1 | 0 | 0 | 0 | 0 | 0 | 0 | 1 | 0 | 0 | 0 | 2 |
| hsa-miR-509_st2 | 0 | 0 | 0 | 0 | 0 | 0 | 1 | 0 | 0 | 0 | 2 |
| hsa-miR-513_st1 | 0 | 0 | 0 | 0 | 0 | 0 | 1 | 0 | 0 | 0 | 2 |
| hsa-miR-576_st2 | 0 | 0 | 0 | 0 | 1 | 0 | 0 | 0 | 0 | 0 | 2 |
| hsa-miR-7_st1 | 0 | 0 | 0 | 0 | 0 | 0 | 0 | 0 | 0 | 1 | 2 |
| hsa-asg-1020_st2 | 0 | 0 | 0 | 0 | 0 | 0 | 0 | 0 | 0 | 0 | 1 |
| hsa-asg-10250_st1 | 0 | 0 | 0 | 0 | 0 | 0 | 0 | 0 | 0 | 0 | 1 |
| hsa-asg-10304_st1 | 0 | 0 | 0 | 0 | 0 | 0 | 0 | 0 | 0 | 0 | 1 |
| hsa-asg-1035_st2 | 0 | 0 | 0 | 0 | 0 | 1 | 0 | 0 | 0 | 0 | 1 |
| hsa-asg-10378_st1 | 0 | 0 | 0 | 0 | 0 | 0 | 1 | 0 | 0 | 0 | 1 |
| hsa-asg-10478_st2 | 0 | 0 | 0 | 0 | 0 | 0 | 0 | 0 | 0 | 0 | 1 |
| hsa-asg-1089_st1 | 0 | 0 | 0 | 0 | 0 | 0 | 0 | 0 | 0 | 0 | 1 |
| hsa-asg-10947_st1 | 0 | 0 | 0 | 0 | 0 | 0 | 0 | 0 | 0 | 0 | 1 |
| hsa-asg-11391_st1 | 0 | 0 | 0 | 0 | 0 | 1 | 0 | 0 | 0 | 0 | 1 |
| hsa-asg-11425_st1 | 0 | 0 | 0 | 0 | 0 | 1 | 0 | 0 | 0 | 0 | 1 |
| hsa-asg-11463_st1 | 0 | 0 | 0 | 0 | 0 | 0 | 0 | 0 | 0 | 0 | 1 |
| hsa-asg-11612_st1 | 0 | 0 | 0 | 0 | 0 | 0 | 0 | 0 | 0 | 0 | 1 |
| hsa-asg-11777_st1 | 0 | 0 | 0 | 0 | 0 | 0 | 0 | 0 | 0 | 0 | 1 |
| hsa-asg-1196_st1 | 0 | 0 | 0 | 0 | 0 | 0 | 0 | 0 | 0 | 0 | 1 |
| hsa-asg-1199_st1 | 0 | 0 | 0 | 0 | 0 | 0 | 0 | 0 | 0 | 0 | 1 |
| hsa-asg-1203_st1 | 0 | 0 | 0 | 0 | 0 | 0 | 0 | 0 | 0 | 0 | 1 |
| hsa-asg-12142_st1 | 0 | 0 | 0 | 0 | 0 | 0 | 0 | 0 | 0 | 0 | 1 |
| hsa-asg-12172_st2 | 0 | 0 | 0 | 0 | 0 | 0 | 0 | 0 | 0 | 0 | 1 |
| hsa-asg-12250_st2 | 0 | 0 | 0 | 0 | 0 | 0 | 0 | 0 | 0 | 0 | 1 |
| hsa-asg-12253_st2 | 0 | 0 | 0 | 0 | 0 | 0 | 0 | 0 | 0 | 0 | 1 |
| hsa-asg-12356_st1 | 0 | 0 | 0 | 0 | 0 | 0 | 0 | 0 | 0 | 0 | 1 |
| hsa-asg-12440_st2 | 0 | 0 | 0 | 0 | 0 | 0 | 0 | 0 | 0 | 0 | 1 |
| hsa-asg-124_st1 | 0 | 0 | 0 | 0 | 0 | 0 | 0 | 0 | 0 | 0 | 1 |
| hsa-asg-12515_st2 | 0 | 0 | 0 | 0 | 0 | 0 | 0 | 0 | 0 | 0 | 1 |
| hsa-asg-12531_st1 | 0 | 0 | 0 | 0 | 0 | 0 | 0 | 0 | 0 | 0 | 1 |
| hsa-asg-12552_st1 | 0 | 0 | 0 | 0 | 0 | 0 | 0 | 0 | 0 | 0 | 1 |
| hsa-asg-1260_st1 | 0 | 0 | 0 | 0 | 0 | 0 | 0 | 0 | 0 | 0 | 1 |
| hsa-asg-1270_st2 | 0 | 0 | 0 | 0 | 0 | 0 | 0 | 0 | 0 | 0 | 1 |
| hsa-asg-12735_st1 | 0 | 0 | 0 | 0 | 0 | 0 | 0 | 0 | 0 | 0 | 1 |
| hsa-asg-12799_st1 | 0 | 0 | 0 | 0 | 0 | 0 | 0 | 0 | 0 | 0 | 1 |
| hsa-asg-12824_st1 | 0 | 0 | 0 | 0 | 0 | 0 | 0 | 0 | 0 | 0 | 1 |
| hsa-asg-128_st2 | 0 | 0 | 0 | 0 | 0 | 0 | 0 | 0 | 0 | 0 | 1 |
| hsa-asg-12959_st1 | 0 | 0 | 0 | 0 | 0 | 0 | 0 | 0 | 0 | 0 | 1 |
| hsa-asg-13077_st1 | 0 | 0 | 0 | 0 | 0 | 0 | 0 | 0 | 0 | 0 | 1 |
| hsa-asg-13097_st1 | 1 | 0 | 0 | 0 | 0 | 0 | 0 | 0 | 0 | 0 | 1 |
| hsa-asg-13159_st1 | 0 | 0 | 0 | 0 | 0 | 0 | 0 | 0 | 0 | 0 | 1 |
| hsa-asg-13160_st1 | 0 | 0 | 0 | 0 | 0 | 0 | 0 | 0 | 0 | 0 | 1 |
| hsa-asg-13258_st2 | 0 | 0 | 0 | 0 | 0 | 0 | 1 | 0 | 0 | 0 | 1 |
| hsa-asg-13498_st1 | 0 | 0 | 0 | 0 | 0 | 0 | 0 | 0 | 0 | 0 | 1 |
| hsa-asg-13589_st2 | 0 | 0 | 0 | 0 | 0 | 0 | 0 | 0 | 0 | 0 | 1 |
| hsa-asg-13646_st1 | 0 | 0 | 0 | 0 | 0 | 0 | 1 | 0 | 0 | 0 | 1 |
| hsa-asg-13741_st2 | 0 | 0 | 0 | 0 | 0 | 0 | 0 | 0 | 0 | 0 | 1 |
| hsa-asg-1375_st1 | 0 | 0 | 0 | 0 | 0 | 0 | 0 | 0 | 0 | 0 | 1 |
| hsa-asg-13801_st1 | 0 | 0 | 0 | 0 | 0 | 0 | 0 | 0 | 0 | 0 | 1 |
| hsa-asg-13878_st2 | 0 | 0 | 0 | 0 | 0 | 0 | 0 | 0 | 0 | 0 | 1 |
| hsa-asg-13908_st2 | 0 | 0 | 0 | 0 | 0 | 0 | 0 | 0 | 0 | 1 | 1 |
| hsa-asg-13997_st2 | 0 | 0 | 0 | 0 | 0 | 0 | 0 | 0 | 0 | 0 | 1 |
| hsa-asg-14020_st2 | 0 | 0 | 0 | 0 | 0 | 0 | 0 | 0 | 0 | 0 | 1 |
| hsa-asg-14134_st1 | 1 | 0 | 0 | 0 | 0 | 0 | 0 | 0 | 0 | 0 | 1 |
| hsa-asg-14147_st1 | 0 | 0 | 0 | 0 | 0 | 0 | 1 | 0 | 0 | 0 | 1 |
| hsa-asg-14160_st1 | 0 | 0 | 1 | 0 | 0 | 0 | 0 | 0 | 0 | 0 | 1 |
| hsa-asg-14176_st1 | 1 | 0 | 0 | 0 | 0 | 0 | 0 | 0 | 0 | 0 | 1 |
| hsa-asg-14178_st2 | 0 | 0 | 0 | 0 | 0 | 0 | 0 | 0 | 0 | 0 | 1 |
| hsa-asg-14209_st1 | 0 | 0 | 0 | 0 | 0 | 0 | 0 | 0 | 0 | 0 | 1 |
| hsa-asg-1608_st2 | 0 | 0 | 0 | 0 | 0 | 0 | 0 | 0 | 0 | 0 | 1 |
| hsa-asg-1619_st2 | 0 | 0 | 0 | 0 | 0 | 0 | 0 | 0 | 0 | 0 | 1 |
| hsa-asg-1765_st1 | 0 | 0 | 0 | 0 | 0 | 0 | 0 | 0 | 0 | 0 | 1 |
| hsa-asg-1826_st2 | 0 | 0 | 0 | 0 | 0 | 0 | 0 | 0 | 0 | 0 | 1 |
| hsa-asg-1881_st2 | 0 | 0 | 0 | 0 | 0 | 0 | 0 | 0 | 0 | 0 | 1 |
| hsa-asg-2025_st2 | 0 | 0 | 0 | 0 | 0 | 0 | 1 | 0 | 0 | 0 | 1 |
| hsa-asg-20_st1 | 0 | 0 | 0 | 0 | 0 | 0 | 0 | 0 | 0 | 0 | 1 |
| hsa-asg-2303_st1 | 0 | 0 | 0 | 0 | 0 | 1 | 0 | 0 | 0 | 0 | 1 |
| hsa-asg-2364_st1 | 0 | 0 | 0 | 0 | 0 | 0 | 0 | 0 | 0 | 0 | 1 |
| hsa-asg-2381_st2 | 0 | 0 | 0 | 0 | 0 | 0 | 0 | 0 | 0 | 1 | 1 |
| hsa-asg-2637_st1 | 0 | 0 | 0 | 0 | 0 | 0 | 0 | 0 | 0 | 0 | 1 |
| hsa-asg-2845_st2 | 0 | 0 | 0 | 0 | 0 | 0 | 0 | 0 | 0 | 0 | 1 |
| hsa-asg-3009_st1 | 0 | 0 | 0 | 0 | 0 | 0 | 0 | 0 | 0 | 0 | 1 |
| hsa-asg-3185_st1 | 0 | 0 | 0 | 0 | 0 | 0 | 0 | 0 | 0 | 0 | 1 |
| hsa-asg-3322_st2 | 0 | 0 | 0 | 0 | 0 | 0 | 0 | 0 | 0 | 0 | 1 |
| hsa-asg-3373_st2 | 0 | 0 | 0 | 0 | 0 | 0 | 0 | 0 | 0 | 0 | 1 |
| hsa-asg-3376_st1 | 0 | 0 | 0 | 0 | 0 | 0 | 0 | 0 | 0 | 0 | 1 |
| hsa-asg-3406_st1 | 0 | 0 | 0 | 0 | 0 | 0 | 0 | 0 | 0 | 0 | 1 |
| hsa-asg-3473_st1 | 0 | 0 | 0 | 0 | 0 | 0 | 0 | 0 | 0 | 0 | 1 |
| hsa-asg-353_st1 | 0 | 0 | 0 | 0 | 0 | 0 | 0 | 0 | 0 | 1 | 1 |
| hsa-asg-3595_st1 | 0 | 0 | 0 | 0 | 0 | 0 | 0 | 0 | 0 | 0 | 1 |
| hsa-asg-3597_st2 | 0 | 0 | 0 | 0 | 0 | 0 | 0 | 0 | 0 | 0 | 1 |
| hsa-asg-3672_st1 | 0 | 0 | 0 | 0 | 0 | 0 | 0 | 0 | 0 | 0 | 1 |
| hsa-asg-3711_st2 | 0 | 0 | 0 | 0 | 0 | 0 | 0 | 0 | 0 | 0 | 1 |
| hsa-asg-3731_st1 | 0 | 0 | 0 | 0 | 0 | 0 | 0 | 0 | 0 | 0 | 1 |
| hsa-asg-3740_st1 | 0 | 0 | 0 | 0 | 0 | 0 | 0 | 0 | 0 | 0 | 1 |
| hsa-asg-3742_st1 | 0 | 0 | 0 | 0 | 0 | 0 | 0 | 0 | 0 | 0 | 1 |
| hsa-asg-3743_st1 | 0 | 0 | 0 | 0 | 0 | 0 | 0 | 0 | 0 | 0 | 1 |
| hsa-asg-3754_st2 | 0 | 0 | 0 | 0 | 0 | 0 | 0 | 0 | 0 | 0 | 1 |
| hsa-asg-3782_st1 | 0 | 0 | 0 | 0 | 0 | 0 | 0 | 0 | 0 | 0 | 1 |
| hsa-asg-3910_st2 | 0 | 0 | 0 | 1 | 0 | 0 | 0 | 0 | 0 | 0 | 1 |
| hsa-asg-3922_st2 | 0 | 0 | 0 | 0 | 0 | 1 | 0 | 0 | 0 | 0 | 1 |
| hsa-asg-3979_st1 | 0 | 0 | 0 | 0 | 0 | 0 | 0 | 0 | 0 | 0 | 1 |
| hsa-asg-3985_st1 | 0 | 0 | 0 | 0 | 0 | 0 | 0 | 0 | 0 | 0 | 1 |
| hsa-asg-4037_st1 | 0 | 0 | 0 | 0 | 0 | 0 | 0 | 0 | 0 | 0 | 1 |
| hsa-asg-4201_st1 | 0 | 0 | 0 | 0 | 0 | 0 | 0 | 0 | 0 | 0 | 1 |
| hsa-asg-4283_st2 | 0 | 0 | 0 | 0 | 0 | 0 | 0 | 0 | 0 | 0 | 1 |
| hsa-asg-4441_st1 | 0 | 0 | 0 | 0 | 0 | 0 | 0 | 0 | 0 | 0 | 1 |
| hsa-asg-4471_st1 | 0 | 0 | 0 | 0 | 0 | 0 | 0 | 0 | 0 | 0 | 1 |
| hsa-asg-4472_st2 | 0 | 0 | 0 | 0 | 0 | 0 | 0 | 0 | 0 | 0 | 1 |
| hsa-asg-4574_st2 | 0 | 0 | 0 | 0 | 0 | 0 | 0 | 0 | 0 | 0 | 1 |
| hsa-asg-4691_st1 | 0 | 0 | 0 | 0 | 0 | 0 | 0 | 0 | 0 | 0 | 1 |
| hsa-asg-4756_st2 | 0 | 0 | 0 | 0 | 0 | 0 | 0 | 0 | 0 | 0 | 1 |
| hsa-asg-4803_st2 | 0 | 0 | 1 | 0 | 0 | 0 | 0 | 0 | 0 | 0 | 1 |
| hsa-asg-4872_st1 | 0 | 0 | 0 | 0 | 0 | 0 | 0 | 0 | 0 | 0 | 1 |
| hsa-asg-4913_st1 | 0 | 0 | 0 | 0 | 0 | 0 | 0 | 0 | 0 | 1 | 1 |
| hsa-asg-5149_st2 | 0 | 0 | 0 | 0 | 0 | 0 | 0 | 0 | 0 | 0 | 1 |
| hsa-asg-5205_st1 | 0 | 0 | 0 | 0 | 0 | 0 | 0 | 0 | 0 | 0 | 1 |
| hsa-asg-5455_st2 | 0 | 0 | 0 | 0 | 0 | 0 | 0 | 0 | 0 | 0 | 1 |
| hsa-asg-558_st1 | 0 | 0 | 0 | 0 | 0 | 0 | 0 | 0 | 0 | 0 | 1 |
| hsa-asg-5606_st1 | 0 | 0 | 0 | 0 | 0 | 0 | 0 | 0 | 0 | 0 | 1 |
| hsa-asg-5618_st1 | 0 | 0 | 0 | 0 | 0 | 0 | 0 | 0 | 0 | 1 | 1 |
| hsa-asg-562_st1 | 1 | 0 | 0 | 0 | 0 | 0 | 0 | 0 | 0 | 0 | 1 |
| hsa-asg-5741_st2 | 0 | 0 | 0 | 0 | 0 | 0 | 0 | 0 | 0 | 0 | 1 |
| hsa-asg-5886_st2 | 0 | 0 | 0 | 0 | 0 | 0 | 0 | 0 | 0 | 0 | 1 |
| hsa-asg-5996_st2 | 0 | 0 | 0 | 0 | 0 | 0 | 0 | 0 | 0 | 0 | 1 |
| hsa-asg-6027_st2 | 0 | 0 | 0 | 0 | 0 | 0 | 0 | 0 | 0 | 0 | 1 |
| hsa-asg-6160_st1 | 0 | 0 | 0 | 0 | 0 | 0 | 0 | 0 | 0 | 1 | 1 |
| hsa-asg-6178_st2 | 0 | 0 | 0 | 0 | 0 | 0 | 0 | 0 | 0 | 0 | 1 |
| hsa-asg-6377_st2 | 0 | 0 | 0 | 0 | 0 | 0 | 0 | 0 | 0 | 0 | 1 |
| hsa-asg-6619_st1 | 0 | 0 | 0 | 0 | 0 | 0 | 0 | 0 | 0 | 0 | 1 |
| hsa-asg-6623_st2 | 0 | 0 | 0 | 0 | 0 | 0 | 0 | 0 | 0 | 0 | 1 |
| hsa-asg-6667_st1 | 0 | 0 | 0 | 0 | 0 | 0 | 0 | 0 | 0 | 0 | 1 |
| hsa-asg-677_st2 | 0 | 0 | 0 | 0 | 0 | 0 | 0 | 0 | 0 | 0 | 1 |
| hsa-asg-6815_st1 | 0 | 0 | 0 | 0 | 0 | 0 | 0 | 0 | 0 | 0 | 1 |
| hsa-asg-6838_st1 | 0 | 0 | 0 | 0 | 0 | 0 | 0 | 0 | 0 | 0 | 1 |
| hsa-asg-6845_st2 | 0 | 0 | 0 | 1 | 0 | 0 | 0 | 0 | 0 | 0 | 1 |
| hsa-asg-6880_st1 | 0 | 0 | 0 | 0 | 0 | 0 | 0 | 0 | 0 | 0 | 1 |
| hsa-asg-6890_st1 | 0 | 0 | 0 | 0 | 0 | 0 | 0 | 0 | 0 | 0 | 1 |
| hsa-asg-6915_st1 | 0 | 0 | 0 | 0 | 0 | 0 | 0 | 0 | 0 | 0 | 1 |
| hsa-asg-7159_st2 | 0 | 0 | 0 | 0 | 0 | 0 | 0 | 0 | 0 | 0 | 1 |
| hsa-asg-7388_st1 | 0 | 0 | 0 | 0 | 0 | 0 | 0 | 0 | 0 | 0 | 1 |
| hsa-asg-7465_st2 | 0 | 0 | 0 | 0 | 0 | 0 | 0 | 0 | 0 | 0 | 1 |
| hsa-asg-7527_st2 | 0 | 0 | 0 | 0 | 0 | 0 | 0 | 0 | 0 | 0 | 1 |
| hsa-asg-7615_st2 | 0 | 0 | 0 | 0 | 0 | 0 | 0 | 0 | 0 | 1 | 1 |
| hsa-asg-7671_st1 | 0 | 0 | 0 | 0 | 0 | 0 | 0 | 0 | 0 | 0 | 1 |
| hsa-asg-7751_st2 | 0 | 0 | 0 | 0 | 0 | 0 | 0 | 0 | 0 | 0 | 1 |
| hsa-asg-7846_st1 | 0 | 0 | 0 | 0 | 0 | 0 | 0 | 0 | 0 | 0 | 1 |
| hsa-asg-791_st1 | 0 | 0 | 0 | 0 | 0 | 0 | 0 | 0 | 0 | 0 | 1 |
| hsa-asg-8039_st2 | 0 | 0 | 0 | 0 | 0 | 0 | 0 | 0 | 0 | 0 | 1 |
| hsa-asg-8067_st2 | 0 | 0 | 0 | 0 | 0 | 0 | 0 | 0 | 0 | 0 | 1 |
| hsa-asg-8129_st2 | 0 | 0 | 0 | 0 | 0 | 0 | 0 | 0 | 0 | 0 | 1 |
| hsa-asg-8138_st2 | 0 | 0 | 0 | 0 | 0 | 0 | 0 | 0 | 0 | 0 | 1 |
| hsa-asg-8242_st2 | 0 | 0 | 0 | 0 | 0 | 0 | 0 | 0 | 0 | 0 | 1 |
| hsa-asg-8293_st2 | 0 | 0 | 0 | 0 | 0 | 0 | 0 | 0 | 0 | 0 | 1 |
| hsa-asg-8329_st1 | 0 | 0 | 0 | 0 | 0 | 0 | 0 | 0 | 0 | 0 | 1 |
| hsa-asg-8330_st2 | 0 | 0 | 0 | 0 | 0 | 0 | 0 | 0 | 0 | 0 | 1 |
| hsa-asg-8411_st2 | 0 | 0 | 0 | 0 | 0 | 0 | 1 | 0 | 0 | 0 | 1 |
| hsa-asg-8486_st2 | 0 | 0 | 0 | 0 | 0 | 0 | 0 | 0 | 0 | 0 | 1 |
| hsa-asg-8630_st2 | 0 | 0 | 0 | 0 | 0 | 0 | 0 | 0 | 0 | 0 | 1 |
| hsa-asg-8893_st1 | 0 | 0 | 0 | 0 | 0 | 0 | 0 | 0 | 0 | 0 | 1 |
| hsa-asg-8987_st1 | 0 | 0 | 0 | 0 | 0 | 0 | 0 | 0 | 0 | 0 | 1 |
| hsa-asg-9009_st1 | 0 | 0 | 0 | 0 | 0 | 0 | 0 | 0 | 0 | 0 | 1 |
| hsa-asg-9303_st2 | 0 | 0 | 0 | 0 | 0 | 0 | 0 | 0 | 0 | 0 | 1 |
| hsa-asg-9365_st2 | 0 | 0 | 0 | 0 | 0 | 0 | 0 | 0 | 0 | 0 | 1 |
| hsa-asg-9491_st1 | 0 | 0 | 0 | 0 | 0 | 0 | 0 | 0 | 0 | 0 | 1 |
| hsa-asg-9510_st1 | 0 | 0 | 0 | 0 | 0 | 0 | 0 | 0 | 0 | 0 | 1 |
| hsa-asg-9512_st1 | 0 | 0 | 0 | 0 | 0 | 0 | 0 | 0 | 0 | 0 | 1 |
| hsa-asg-9663_st1 | 0 | 0 | 0 | 0 | 0 | 1 | 0 | 0 | 0 | 0 | 1 |
| hsa-asg-9757_st1 | 0 | 0 | 0 | 0 | 0 | 0 | 0 | 0 | 0 | 0 | 1 |
| hsa-asg-9939_st2 | 0 | 0 | 0 | 0 | 0 | 0 | 0 | 0 | 0 | 0 | 1 |
| hsa-asg-9971_st2 | 0 | 0 | 0 | 0 | 0 | 0 | 0 | 0 | 0 | 0 | 1 |
| hsa-cand330_st2 | 0 | 0 | 0 | 0 | 0 | 0 | 0 | 0 | 0 | 0 | 1 |
| hsa-cand443_st2 | 0 | 0 | 0 | 0 | 0 | 0 | 0 | 0 | 0 | 0 | 1 |
| hsa-cand561_st1 | 0 | 0 | 0 | 0 | 0 | 0 | 0 | 0 | 0 | 0 | 1 |
| hsa-cand660_st1 | 0 | 0 | 0 | 0 | 0 | 0 | 0 | 0 | 0 | 0 | 1 |
| hsa-cand733_st1 | 0 | 0 | 0 | 0 | 0 | 0 | 0 | 0 | 0 | 0 | 1 |
| hsa-cand852_st2 | 0 | 0 | 0 | 0 | 0 | 0 | 0 | 0 | 0 | 1 | 1 |
| hsa-cand91_st1 | 0 | 0 | 0 | 0 | 0 | 0 | 0 | 0 | 0 | 0 | 1 |
| hsa-cand930_st1 | 0 | 0 | 0 | 0 | 0 | 0 | 0 | 0 | 0 | 0 | 1 |
| hsa-miR-101_st1 | 0 | 0 | 0 | 0 | 0 | 0 | 1 | 0 | 0 | 0 | 1 |
| hsa-miR-122a_st1 | 0 | 0 | 0 | 0 | 0 | 1 | 0 | 0 | 0 | 0 | 1 |
| hsa-miR-128a_st2 | 0 | 0 | 0 | 0 | 0 | 0 | 0 | 0 | 0 | 0 | 1 |
| hsa-miR-128b_st1 | 0 | 0 | 0 | 0 | 0 | 0 | 0 | 0 | 0 | 0 | 1 |
| hsa-miR-129_st1 | 0 | 0 | 0 | 0 | 0 | 0 | 0 | 0 | 0 | 0 | 1 |
| hsa-miR-135b_st2 | 0 | 0 | 0 | 0 | 0 | 0 | 0 | 0 | 0 | 0 | 1 |
| hsa-miR-137_st1 | 0 | 0 | 0 | 0 | 0 | 0 | 0 | 0 | 0 | 0 | 1 |
| hsa-miR-138_st1 | 0 | 0 | 0 | 0 | 0 | 0 | 0 | 0 | 0 | 0 | 1 |
| hsa-miR-153_st2 | 0 | 0 | 0 | 0 | 0 | 0 | 0 | 0 | 0 | 0 | 1 |
| hsa-miR-193b_st1 | 1 | 0 | 0 | 0 | 0 | 0 | 0 | 0 | 0 | 0 | 1 |
| hsa-miR-196b_st2 | 1 | 0 | 0 | 0 | 0 | 0 | 0 | 0 | 0 | 0 | 1 |
| hsa-miR-199b_st2 | 1 | 0 | 0 | 0 | 0 | 0 | 0 | 0 | 0 | 0 | 1 |
| hsa-miR-19a_st1 | 0 | 0 | 0 | 0 | 0 | 0 | 1 | 0 | 0 | 0 | 1 |
| hsa-miR-1_st1 | 1 | 0 | 0 | 0 | 0 | 0 | 0 | 0 | 0 | 0 | 1 |
| hsa-miR-202_st1 | 0 | 0 | 0 | 0 | 0 | 0 | 0 | 0 | 0 | 0 | 1 |
| hsa-miR-212_st2 | 0 | 0 | 0 | 0 | 0 | 0 | 0 | 0 | 0 | 0 | 1 |
| hsa-miR-216_st2 | 0 | 0 | 0 | 0 | 0 | 0 | 0 | 0 | 0 | 1 | 1 |
| hsa-miR-217_st1 | 0 | 0 | 0 | 0 | 0 | 0 | 0 | 0 | 0 | 1 | 1 |
| hsa-miR-218_st2 | 1 | 0 | 0 | 0 | 0 | 0 | 0 | 0 | 0 | 0 | 1 |
| hsa-miR-224_st2 | 1 | 0 | 0 | 0 | 0 | 0 | 0 | 0 | 0 | 0 | 1 |
| hsa-miR-299-3p_st2 | 0 | 0 | 0 | 0 | 0 | 0 | 0 | 0 | 0 | 0 | 1 |
| hsa-miR-323_st1 | 0 | 0 | 0 | 0 | 0 | 0 | 0 | 0 | 0 | 0 | 1 |
| hsa-miR-330_st2 | 0 | 0 | 0 | 0 | 0 | 0 | 0 | 0 | 0 | 0 | 1 |
| hsa-miR-346_st1 | 0 | 0 | 0 | 0 | 0 | 0 | 0 | 0 | 0 | 0 | 1 |
| hsa-miR-370_st1 | 0 | 0 | 0 | 0 | 0 | 0 | 0 | 0 | 0 | 0 | 1 |
| hsa-miR-377_st1 | 0 | 0 | 0 | 0 | 0 | 0 | 0 | 0 | 0 | 0 | 1 |
| hsa-miR-452-_st1 | 0 | 0 | 1 | 0 | 0 | 0 | 0 | 0 | 0 | 0 | 1 |
| hsa-miR-452_st1 | 1 | 0 | 0 | 0 | 0 | 0 | 0 | 0 | 0 | 0 | 1 |
| hsa-miR-455_st1 | 1 | 0 | 0 | 0 | 0 | 0 | 0 | 0 | 0 | 0 | 1 |
| hsa-miR-483_st1 | 0 | 0 | 0 | 0 | 0 | 1 | 0 | 0 | 0 | 0 | 1 |
| hsa-miR-489_st2 | 0 | 0 | 0 | 0 | 0 | 0 | 0 | 0 | 0 | 0 | 1 |
| hsa-miR-491_st1 | 0 | 0 | 0 | 0 | 0 | 0 | 0 | 0 | 0 | 0 | 1 |
| hsa-miR-493-3p_st1 | 0 | 0 | 0 | 0 | 0 | 0 | 1 | 0 | 0 | 0 | 1 |
| hsa-miR-499_st1 | 0 | 0 | 0 | 0 | 1 | 0 | 0 | 0 | 0 | 0 | 1 |
| hsa-miR-506_st2 | 0 | 0 | 0 | 0 | 0 | 0 | 0 | 0 | 0 | 0 | 1 |
| hsa-miR-510_st2 | 0 | 0 | 0 | 0 | 0 | 0 | 0 | 0 | 0 | 0 | 1 |
| hsa-miR-514_st1 | 0 | 0 | 0 | 0 | 0 | 0 | 0 | 0 | 0 | 0 | 1 |
| hsa-miR-515-3p_st2 | 0 | 0 | 0 | 0 | 0 | 0 | 0 | 0 | 0 | 0 | 1 |
| hsa-miR-517a_st1 | 0 | 0 | 0 | 0 | 0 | 0 | 0 | 0 | 0 | 0 | 1 |
| hsa-miR-517b_st1 | 0 | 0 | 1 | 0 | 0 | 0 | 0 | 0 | 0 | 0 | 1 |
| hsa-miR-517c_st2 | 0 | 0 | 0 | 0 | 0 | 0 | 0 | 0 | 0 | 0 | 1 |
| hsa-miR-518f-_st2 | 0 | 0 | 0 | 0 | 0 | 0 | 0 | 0 | 0 | 0 | 1 |
| hsa-miR-519d_st1 | 0 | 0 | 0 | 0 | 0 | 0 | 0 | 0 | 0 | 0 | 1 |
| hsa-miR-520a-_st2 | 0 | 0 | 0 | 0 | 0 | 0 | 0 | 0 | 0 | 0 | 1 |
| hsa-miR-520c_st2 | 0 | 0 | 0 | 0 | 0 | 0 | 0 | 0 | 0 | 0 | 1 |
| hsa-miR-520g_st1 | 0 | 0 | 0 | 0 | 0 | 0 | 0 | 0 | 0 | 0 | 1 |
| hsa-miR-520h_st1 | 0 | 0 | 0 | 0 | 0 | 0 | 0 | 0 | 0 | 0 | 1 |
| hsa-miR-525_st2 | 0 | 0 | 0 | 0 | 0 | 0 | 0 | 0 | 0 | 0 | 1 |
| hsa-miR-526a_st2 | 0 | 0 | 0 | 0 | 0 | 0 | 0 | 0 | 0 | 0 | 1 |
| hsa-miR-526b_st2 | 0 | 0 | 0 | 0 | 0 | 0 | 0 | 0 | 0 | 0 | 1 |
| hsa-miR-526c_st1 | 0 | 0 | 0 | 0 | 0 | 0 | 0 | 0 | 0 | 0 | 1 |
| hsa-miR-542-3p_st1 | 0 | 0 | 0 | 0 | 0 | 0 | 0 | 0 | 0 | 0 | 1 |
| hsa-miR-572_st1 | 0 | 0 | 0 | 0 | 0 | 0 | 0 | 0 | 0 | 0 | 1 |
| hsa-miR-577_st1 | 0 | 0 | 0 | 0 | 0 | 0 | 0 | 0 | 0 | 0 | 1 |
| hsa-miR-584_st2 | 0 | 0 | 0 | 0 | 0 | 0 | 0 | 0 | 0 | 0 | 1 |
| hsa-miR-598_st2 | 0 | 0 | 0 | 0 | 0 | 0 | 0 | 0 | 0 | 0 | 1 |
| hsa-miR-608_st2 | 0 | 0 | 0 | 0 | 0 | 0 | 0 | 0 | 0 | 0 | 1 |
| hsa-miR140_st1 | 0 | 0 | 0 | 0 | 0 | 0 | 0 | 0 | 0 | 0 | 1 |
| hsa-miR141_st1 | 0 | 0 | 0 | 0 | 0 | 0 | 1 | 0 | 0 | 0 | 1 |
| hsa-miR154_st1 | 0 | 0 | 1 | 0 | 0 | 0 | 0 | 0 | 0 | 0 | 1 |
| hsa-miR157_st2 | 1 | 0 | 0 | 0 | 0 | 0 | 0 | 0 | 0 | 0 | 1 |
| hsa-miR167_st2 | 0 | 0 | 1 | 0 | 0 | 0 | 0 | 0 | 0 | 0 | 1 |
| hsa-miR177_st1 | 0 | 0 | 0 | 0 | 0 | 0 | 0 | 0 | 0 | 0 | 1 |
| hsa-miR206_st1 | 0 | 0 | 0 | 0 | 0 | 0 | 0 | 0 | 0 | 0 | 1 |
| hsa-miR223_st2 | 0 | 0 | 0 | 0 | 0 | 0 | 0 | 0 | 0 | 0 | 1 |

Abbreviations:
THY, thymus;
KID, kideny;
STO, stomach;
TES, testicle;
UTR, uterus;
SPL, spleen;
BRN, brain;
TNG, tongue;
TMS, thymus;
TRA, trachea;
SI, small intestine;
CRX, cervix;
COL, colon;
BRS, breast;
BLD, bladder;
ESO, esophagus;
LIV, liver;
OVR, ovary;
PRO, prostate;
LUN, lung;
PAN, pancreas

### Example 39

### miRNA Combinations for the Detection of Lymph Node Metastases from Different Cancer Types

[0353] The inventors evaluated the most differentially-expressed miRNA markers between positive and negative lymph nodes from patients with cervical cancer (Example 3), colon cancer (Example 17) and breast cancer (Example 40) and determined that several useful markers (miR-141, -203, miR-429, miR-200a, miR-200b, and miR-200c ) are conserved for these different cancer types. qRT-PCR quantification of these miRNAs, from positive and negative lymph nodes from patients with cervical cancer and colon cancer, was performed as described above in Example 7, Example 17, and Example 40) (FIG. 12A). As shown in FIG. 12B, the summation of the normalized Ct values for representative combinations of these miRNAs increased the separation between the positive and negative lymph nodes in each cancer type. More generally, common miRNA markers useful for the determination of metastasis of multiple cancers can be identified after comparison of the different normal tissues and normal lymph nodes, as reported in Example 38 (Table 37).

### Example 40

### miRNAs Differentially Expressed Between Paired Cancer-Positive and Cancer-Negative Axillary Lymph Nodes from Breast Cancer Patients

[0354] To identify miRNAs that may be useful markers for the presence of breast cancer metastasis in axillary lymph nodes, the inventors identified miRNAs that are expressed at significantly higher levels in cancer-positive lymph nodes (LNpos) compared to cancer-negative lymph nodes (LNneg) from breast cancer patients.

[0355] FFPE samples of paired cancer-positive (LNpos 1-4) and cancer-negative (LNneg 1-4) axillary lymph nodes from ductal breast cancer patients were purchased from ProteoGenex (ProteoGenex, Inc.; Culver City, Calif., USA) (Table 38). A pathology report and hematoxilin-eosin (H&E)-stained slides were available for each lymph node sample. H&E slides were reviewed by a pathologist at Asuragen to confirm lymph node statuses as cancer cell-positive or cancer cell-negative. Positive lymph node 1 (LNpos1) contained only a minute amount of tumor cells and was excluded from the analysis. Its counterpart sample, LNneg1, was kept in the analysis, unmatched.

TABLE 38
Patient and tissue sample pathology information for four, paired cancer-positive
(LNpos) and cancer-negative (LNneg) axillary lymph nodes from four independent ductal breast
cancer patients.

| | LN | | Patient | Patient's | Tumor | | | |
|---|---|---|---|---|---|---|---|---|
| Sample | Cancer | | Age (yr) | Histological | size | TNM | AJCC | LN |
| ID | Diagnosis | Sex | Ethnicity | Diagnosis | (cm) | Stage | Stage | Mets |
| LNneg1 | normal | F | 72 | infiltrating ductal | 2.5 | T2N1M0 | IIB | 1/11 |
| LNpos1 | metastatic | | Caucasian | carcinoma, | | | | |
| | | | | moderately | | | | |
| | | | | differentiated | | | | |
| LNneg2 | normal | F | 46 | infiltrating ductal | 2.5 | T2N2M0 | IIIA | 5/9 |
| LNpos2 | metastatic | | Caucasian | and lobular | | | | |
| | | | | carcinoma, | | | | |
| | | | | moderately | | | | |
| | | | | differentiated | | | | |
| LNneg3 | normal | F | 66 | infiltrating ductal | 3.5 | T2N1M0 | IIB | 1/11 |
| LNpos3 | metastatic | | Caucasian | carcinoma, | | | | |
| | | | | moderately | | | | |
| | | | | differentiated | | | | |
| LNneg4 | normal | F | 65 | infiltrating ductal | 3 | T2N1M0 | IIB | 1/8 |
| LNpos4 | metastatic | | Caucasian | carcinoma, | | | | |
| | | | | moderately | | | | |
| | | | | differentiated | | | | |

TNM stage (Sobin and Wittekind, 2002);
AJCC Stage (Greene, 2002);
LN Mets, number of lymph nodes with metastases/total number of lymph nodes examined.

[0356] Total RNA isolation from the FFPE lymph node samples was performed using the RecoverAll™ Total Nucleic Acid Isolation Kit (cat. No. AM1975; Ambion, Inc.; Austin, Tex., USA), as described above in Example 1 and analyzed on miRNA microarrays, as described below.

[0357] miRNA expression was compared between three paired LN samples from three individual patients (LNpos2-4; LNneg2-4) plus one unmatched cancer-negative lymph node (LNneg1). Total RNA from each sample (200 ng) was processed by Asuragen Services (Asuragen Inc., Austin, Tex., USA), according to the company's standard operating procedures. RNA labeling was adapted from a published method (Wang et. al., 2006) that was modified so that RNA is end-labeled with biotin instead of Cy3. Briefly, total RNA is dephosphorylated with calf intestinal phosphatase and the pCp-Biotin labeling molecule is ligated to the 3′ ends of the RNA molecules. Labeled RNA was purified using Bio-Spin 6 columns (Bio-Rad Laboratories, Inc.; Hercules, Calif., USA). Labeled RNA was hybridized to a custom-made microRNA array (miRChip V1.0, manufactured by Affymetrix, Santa Clara, Calif., USA for Ambion), as described above in Example 2. Hybridization, washing, staining, imaging, and signal extraction were performed as recommended by the miRChip manufacturer, except that the 20× GeneChip® Eukaryotic Hybridization Control cocktail was omitted. Signal processing was as described above in Example 2.

[0358] A total of 146 miRNAs (50 verified and 96 predicted) exhibited significant differential expression between positive (LNpos) and negative (LNneg) lymph node samples (t-test (LNpos vs LNneg)<0.05 and log 2-Diff (LNpos vs LNneg)≧1; Flag=1) (Table 39). Among the verified miRNAs, four (hsa-miR-375, -200b, -141, and -200a) had average expression levels between 100- and 350-fold higher in LNpos compared to LNneg; eight (hsa-miR-182, -196a, -200c, -203, -183, -429, -542-5p, and -421-3p) had average expression levels between 10- and 90-fold higher in LNpos; and nine had average expression levels between 5- and 10-fold higher in LNpos samples than in LNneg samples (Table 39). Among the predicted miRNAs, two (hsa-asg-2924_st1 and -1937_st1) had average expression levels at least 10-fold higher in LNpos and thirteen had average expression levels between 5- and 9-fold higher in LNpos than in LNneg samples. In addition, four miRNAs (hsa-asg-6116_st2, -6449_st1, -10487_st1, and -2449_st1) had average expression levels between 5- and 20 fold lower in LNpos compared to LNneg (Table 39).

TABLE 39
miRNAs differentially expressed between three cancer-positive (LNpos2-4) and
four cancer-negative (LNneg1-4) lymph node samples from breast cancer patients.

| | Probe | LNneg | | | | | | |
|---|---|---|---|---|---|---|---|---|
| MicroRNA | ID | 1 | 2 | 3 | 4 | Mean | SD | % |
| hsa-let-7e | hsa-let-7e_st1 | 10.2 | 9.61 | 10.1 | 10.4 | 10.0 | 0.34 | 100 |
| hsa-miR-103 | hsa-miR-103_st1 | 10.7 | 10.7 | 11.2 | 11.2 | 11.0 | 0.26 | 100 |
| hsa-miR-106b | hsa-miR-106b_st2 | 7.39 | 6.69 | 8.17 | 7.51 | 7.44 | 0.61 | 100 |
| hsa-miR-107 | hsa-miR-107_st2 | 10.2 | 10.5 | 10.9 | 11.0 | 10.7 | 0.34 | 100 |
| hsa-miR-128a | hsa-miR-128a_st2 | 5.28 | 5.95 | 6.91 | 6.64 | 6.19 | 0.73 | 100 |
| hsa-miR-130b | hsa-miR-130b_st1 | 5.88 | 6.53 | 5.93 | 6.29 | 6.16 | 0.31 | 75 |
| hsa-miR-141 | hsa-miR-141_st1 | 1.83 | 1.74 | 1.19 | 2.79 | 1.89 | 0.67 | 0 |
| hsa-miR-145 | hsa-miR-145_st1 | 12.2 | 12.2 | 12.6 | 12.7 | 12.4 | 0.23 | 100 |
| hsa-miR-148a | hsa-miR-148a_st1 | 8.68 | 7.61 | 8.84 | 8.70 | 8.46 | 0.57 | 100 |
| hsa-miR-148b | hsa-miR-148b_st2 | 4.91 | 4.53 | 5.26 | 6.53 | 5.31 | 0.87 | 100 |
| hsa-miR-151 | hsa-miR-151_st2 | 6.77 | 6.09 | 6.13 | 7.08 | 6.52 | 0.48 | 100 |
| hsa-miR-181a | hsa-miR-181a_st1 | 9.13 | 9.33 | 10.1 | 9.38 | 9.49 | 0.43 | 100 |
| hsa-miR-181a* | hsa-miR-213_st1 | 2.51 | 5.30 | 1.53 | 4.85 | 3.55 | 1.82 | 0 |
| hsa-miR-181d | hsa-miR-181d_st1 | 4.18 | 4.73 | 4.23 | 3.75 | 4.22 | 0.40 | 25 |
| hsa-miR-182 | hsa-miR-182_st1 | 4.12 | 3.75 | 4.13 | 2.79 | 3.70 | 0.63 | 25 |
| hsa-miR-183 | hsa-miR-183_st1 | 1.22 | 2.61 | 1.98 | 3.34 | 2.29 | 0.91 | 0 |
| hsa-miR-189 | hsa-miR-189_st1 | 1.54 | 0.58 | 0.61 | 1.94 | 1.17 | 0.68 | 0 |
| hsa-miR-191 | hsa-miR-191_st2 | 11.1 | 11.0 | 11.6 | 11.6 | 11.3 | 0.32 | 100 |
| hsa-miR-193b | hsa-miR-193b_st1 | 8.14 | 7.05 | 8.93 | 8.20 | 8.08 | 0.77 | 25 |
| hsa-miR-196a | hsa-miR-196a_st2 | 1.83 | 1.35 | 2.90 | 5.38 | 2.86 | 1.80 | 25 |
| hsa-miR-199a | hsa-miR-199a_st2 | 9.70 | 9.17 | 9.48 | 9.31 | 9.42 | 0.23 | 100 |
| hsa-miR-200a | hsa-miR-200a_st2 | 2.08 | 2.45 | 2.55 | 2.79 | 2.47 | 0.29 | 0 |
| hsa-miR-200a* | hsa-miR-200a-_st2 | 4.36 | 3.93 | 2.55 | 2.92 | 3.44 | 0.85 | 0 |
| hsa-miR-200b | hsa-miR-200b_st1 | 2.51 | 1.86 | 2.55 | 3.52 | 2.61 | 0.68 | 0 |
| hsa-miR-200c | hsa-miR-200c_st1 | 5.06 | 5.86 | 5.74 | 7.26 | 5.98 | 0.92 | 100 |
| hsa-miR-203 | hsa-miR-203_st2 | 3.36 | 3.34 | 2.45 | 2.65 | 2.95 | 0.47 | 0 |
| hsa-miR-21 | hsa-miR-21_st2 | 10.8 | 9.74 | 10.5 | 10.9 | 10.4 | 0.53 | 100 |
| hsa-miR-218 | hsa-miR-218_st2 | 4.05 | 1.35 | 2.90 | 1.94 | 2.56 | 1.18 | 25 |
| hsa-miR-22 | hsa-miR-22_st1 | 8.89 | 9.06 | 9.09 | 9.27 | 9.08 | 0.16 | 100 |
| hsa-miR-224 | hsa-miR-224_st2 | 5.45 | 5.33 | 4.29 | 6.19 | 5.32 | 0.78 | 75 |
| hsa-miR-24 | hsa-miR-24_st1 | 10.2 | 10.1 | 10.8 | 10.9 | 10.5 | 0.43 | 100 |
| hsa-miR-25 | hsa-miR-25_st2 | 9.69 | 9.79 | 10.0 | 9.77 | 9.82 | 0.15 | 100 |
| hsa-miR-27a | hsa-miR-27a_st2 | 8.41 | 8.64 | 8.45 | 9.08 | 8.65 | 0.30 | 100 |
| hsa-miR-30a-3p | hsa-miR-30a-3p_st1 | 4.87 | 5.94 | 5.55 | 6.75 | 5.78 | 0.78 | 75 |
| hsa-miR-30a-5p | hsa-miR-30a-5p_st2 | 9.61 | 9.62 | 9.73 | 10.0 | 9.76 | 0.22 | 100 |
| hsa-miR-30e-5p | hsa-miR-30e-5p_st2 | 8.61 | 7.64 | 8.19 | 8.22 | 8.17 | 0.40 | 100 |
| hsa-miR-34a | hsa-miR-34a_st1 | 5.90 | 5.96 | 6.98 | 7.40 | 6.56 | 0.75 | 100 |
| hsa-miR-34b | hsa-miR-34b_st2 | 2.69 | 2.08 | 2.34 | 2.65 | 2.44 | 0.29 | 0 |
| hsa-miR-363 | hsa-miR-363_st2 | 6.24 | 7.00 | 6.45 | 7.05 | 6.68 | 0.40 | 100 |
| hsa-miR-373* | hsa-miR-373-_st2 | 7.87 | 7.95 | 7.54 | 7.55 | 7.73 | 0.21 | 100 |
| hsa-miR-375 | hsa-miR-375_st1 | 1.38 | 1.48 | 0.23 | 5.42 | 2.13 | 2.27 | 0 |
| hsa-miR-376a | hsa-asg-14234_st1 | 1.83 | 1.62 | 2.11 | 1.46 | 1.75 | 0.28 | 0 |
| hsa-miR-421 | hsa-miR-421-3p_st1 | 3.13 | 1.86 | 2.82 | 1.71 | 2.38 | 0.70 | 0 |
| hsa-miR-425-5p | hsa-asg-14166_st2 | 8.42 | 8.16 | 8.63 | 8.23 | 8.36 | 0.21 | 100 |
| hsa-miR-429 | hsa-miR-429_st1 | 1.83 | 3.60 | 1.84 | 3.82 | 2.77 | 1.09 | 0 |
| hsa-miR-452 | hsa-miR-452_st1 | 4.18 | 5.62 | 5.35 | 4.67 | 4.96 | 0.65 | 50 |
| hsa-miR-489 | hsa-miR-489_st2 | 3.13 | 1.62 | 1.98 | 2.79 | 2.38 | 0.70 | 0 |
| hsa-miR-508 | hsa-miR-508_st1 | 4.12 | 3.13 | 3.82 | 3.25 | 3.58 | 0.47 | 25 |
| hsa-miR-539 | hsa-miR-539_st1 | 2.08 | 2.28 | 2.34 | 1.94 | 2.16 | 0.18 | 0 |
| hsa-miR-542-5p | hsa-miR-542-5p_st2 | 1.83 | 2.69 | 0.81 | 0.89 | 1.55 | 0.89 | 0 |
| hsa-miR-654 | hsa-miR-654_st1 | 8.29 | 7.27 | 6.92 | 7.62 | 7.53 | 0.58 | 50 |
| hsa-miR-93 | hsa-miR-93_st2 | 7.78 | 8.07 | 7.65 | 7.70 | 7.80 | 0.19 | 100 |
| hsa-miR-98 | hsa-miR-98_st1 | 6.21 | 5.76 | 6.81 | 6.05 | 6.21 | 0.44 | 100 |
| hsa-miR-99b | hsa-miR-99b_st1 | 8.04 | 8.22 | 8.49 | 8.50 | 8.31 | 0.22 | 0 |
| hsa-asg-9769 | hsa-asg-9769_st2 | 2.99 | 2.45 | 2.23 | 3.25 | 2.73 | 0.47 | 0 |
| hsa-asg-8901 | hsa-asg-8901_st2 | 12.3 | 12.2 | 12.2 | 12.1 | 12.2 | 0.06 | 100 |
| hsa-asg-860 | hsa-asg-860_st2 | 2.99 | 2.61 | 2.34 | 2.65 | 2.65 | 0.27 | 0 |
| hsa-asg-6457 | hsa-asg-6457_st2 | 3.36 | 3.43 | 3.59 | 2.92 | 3.32 | 0.29 | 0 |
| hsa-asg-5021 | hsa-asg-5021_st1 | 2.08 | 2.61 | 1.98 | 1.46 | 2.03 | 0.47 | 0 |
| hsa-asg-14175 | hsa-asg-14175_st1 | 2.08 | 2.45 | 2.34 | 2.65 | 2.38 | 0.24 | 0 |
| hsa-asg-13258 | hsa-asg-13258_st2 | 4.52 | 5.79 | 5.44 | 6.49 | 5.56 | 0.82 | 25 |
| hsa-asg-13254 | hsa-asg-13254_st1 | 1.22 | 1.74 | 3.05 | 4.28 | 2.57 | 1.38 | 0 |
| hsa-asg-13205 | hsa-asg-13205_st1 | 2.31 | 4.05 | 3.59 | 3.34 | 3.32 | 0.74 | 0 |
| hsa-asg-12885 | hsa-asg-12885_st1 | 3.13 | 2.76 | 2.90 | 2.79 | 2.89 | 0.17 | 0 |
| hsa-asg-12471 | hsa-asg-12471_st1 | 2.31 | 1.86 | 1.84 | 2.15 | 2.04 | 0.23 | 0 |
| hsa-asg-12372 | hsa-asg-12372_st2 | 10.4 | 10.3 | 10.3 | 10.1 | 10.3 | 0.10 | 100 |
| hsa-asg-11896 | hsa-asg-11896_st2 | 11.6 | 11.9 | 11.9 | 11.9 | 11.8 | 0.15 | 25 |
| hsa-asg-11527 | hsa-asg-11527_st1 | 2.51 | 2.76 | 2.11 | 2.79 | 2.54 | 0.31 | 0 |
| hsa-asg-11515 | hsa-asg-11515_st2 | 9.93 | 10.3 | 10.1 | 10.1 | 10.1 | 0.18 | 100 |
| hsa-asg-114 | hsa-asg-114_st2 | 7.40 | 7.70 | 7.42 | 6.99 | 7.38 | 0.30 | 0 |
| hsa-asg-10065 | hsa-asg-10065_st1 | 2.31 | 2.45 | 2.11 | 2.50 | 2.34 | 0.18 | 0 |
| hsa-miR-594 | hsa-miR-594_st2 | 11.2 | 10.9 | 11.2 | 11.4 | 11.2 | 0.22 | 100 |
| hsa-miR246 | hsa-miR246_st2 | 4.79 | 4.25 | 5.00 | 3.52 | 4.39 | 0.66 | 75 |
| hsa-miR181 | hsa-miR181_st2 | 3.36 | 3.34 | 4.20 | 4.51 | 3.85 | 0.59 | 25 |
| hsa-asg-999 | hsa-asg-999_st2 | 6.33 | 6.30 | 5.73 | 6.57 | 6.23 | 0.36 | 100 |
| hsa-asg-9951 | hsa-asg-9951_st2 | 2.69 | 1.74 | 2.11 | 4.18 | 2.68 | 1.07 | 0 |
| hsa-asg-9885 | hsa-asg-9885_st1 | 6.93 | 6.75 | 7.18 | 7.23 | 7.02 | 0.22 | 100 |
| hsa-asg-9856 | hsa-asg-9856_st2 | 2.08 | 2.08 | 2.65 | 0.58 | 1.85 | 0.89 | 0 |
| hsa-asg-9795 | hsa-asg-9795_st2 | 5.93 | 5.99 | 5.88 | 5.67 | 5.87 | 0.14 | 25 |
| hsa-asg-9714 | hsa-asg-9714_st1 | 3.25 | 3.13 | 4.29 | 5.33 | 4.00 | 1.03 | 25 |
| hsa-asg-9687 | hsa-asg-9687_st1 | 1.22 | 1.35 | 1.53 | 1.18 | 1.32 | 0.16 | 0 |
| hsa-asg-9627 | hsa-asg-9627_st1 | 9.91 | 9.74 | 10.0 | 9.66 | 9.84 | 0.18 | 100 |
| hsa-asg-960 | hsa-asg-960_st1 | 9.39 | 9.58 | 8.62 | 9.32 | 9.23 | 0.42 | 100 |
| hsa-asg-9530 | hsa-asg-9530_st2 | 12.6 | 12.6 | 12.6 | 12.6 | 12.6 | 0.01 | 100 |
| hsa-asg-9521 | hsa-asg-9521_st2 | 2.08 | 2.08 | 2.90 | 2.15 | 2.30 | 0.40 | 0 |
| hsa-asg-9484 | hsa-asg-9484_st2 | 10.0 | 10.1 | 10.1 | 10.0 | 10.1 | 0.08 | 100 |
| hsa-asg-9474 | hsa-asg-9474_st2 | 4.75 | 5.26 | 4.67 | 4.78 | 4.87 | 0.27 | 100 |
| hsa-asg-9457 | hsa-asg-9457_st1 | 12.3 | 12.4 | 12.3 | 12.2 | 12.3 | 0.08 | 100 |
| hsa-asg-944 | hsa-asg-944_st2 | 2.85 | 2.89 | 3.43 | 3.04 | 3.05 | 0.26 | 0 |
| hsa-asg-9386 | hsa-asg-9386_st2 | 10.7 | 10.8 | 10.5 | 11.0 | 10.8 | 0.21 | 100 |
| hsa-asg-9297 | hsa-asg-9297_st2 | 3.57 | 3.19 | 3.31 | 4.12 | 3.55 | 0.42 | 0 |
| hsa-asg-9262 | hsa-asg-9262_st1 | 7.91 | 7.56 | 7.43 | 7.89 | 7.70 | 0.24 | 25 |
| hsa-asg-9261 | hsa-asg-9261_st1 | 12.5 | 12.0 | 12.6 | 12.3 | 12.3 | 0.27 | 100 |
| hsa-asg-9238 | hsa-asg-9238_st1 | 9.80 | 9.27 | 9.34 | 9.16 | 9.39 | 0.28 | 100 |
| hsa-asg-9185 | hsa-asg-9185_st2 | 9.19 | 9.37 | 8.94 | 9.42 | 9.23 | 0.22 | 100 |
| hsa-asg-9164 | hsa-asg-9164_st1 | 8.46 | 8.11 | 7.51 | 7.76 | 7.96 | 0.41 | 75 |
| hsa-asg-916 | hsa-asg-916_st1 | 9.84 | 10.1 | 9.78 | 10.0 | 9.94 | 0.16 | 100 |
| hsa-asg-9146 | hsa-asg-9146_st1 | 12.9 | 12.7 | 12.9 | 12.6 | 12.8 | 0.15 | 100 |
| hsa-asg-9078 | hsa-asg-9078_st2 | 11.7 | 11.6 | 11.2 | 11.5 | 11.5 | 0.22 | 0 |
| hsa-asg-907 | hsa-asg-907_st1 | 7.32 | 7.85 | 7.24 | 7.56 | 7.49 | 0.27 | 100 |
| hsa-asg-8957 | hsa-asg-8957_st2 | 9.50 | 9.63 | 9.42 | 9.37 | 9.48 | 0.11 | 100 |
| hsa-asg-8953 | hsa-asg-8953_st1 | 10.6 | 10.3 | 10.6 | 10.3 | 10.4 | 0.15 | 100 |
| hsa-asg-8941 | hsa-asg-8941_st2 | 9.53 | 9.42 | 9.22 | 8.85 | 9.26 | 0.30 | 75 |
| hsa-asg-8932 | hsa-asg-8932_st1 | 7.39 | 6.96 | 7.25 | 6.29 | 6.97 | 0.49 | 100 |
| hsa-asg-8928 | Has-asg-8928_st2 | 8.07 | 8.25 | 7.91 | 8.25 | 8.12 | 0.16 | 0 |
| hsa-asg-88 | Has-asg-88_st1 | 11.8 | 11.9 | 11.7 | 11.7 | 11.8 | 0.12 | 0 |
| hsa-asg-8736 | Has-asg-8736_st2 | 6.22 | 6.09 | 4.92 | 5.49 | 5.68 | 0.60 | 25 |
| hsa-asg-8732 | Has-asg-8732_st1 | 8.74 | 8.29 | 8.71 | 8.13 | 8.47 | 0.30 | 0 |
| hsa-asg-8617 | hsa-asg-8617_st1 | 10.5 | 9.86 | 10.2 | 9.76 | 10.1 | 0.36 | 100 |
| hsa-asg-8546 | hsa-asg-8546_st1 | 8.69 | 8.95 | 8.99 | 7.53 | 8.54 | 0.69 | 100 |
| hsa-asg-8522 | hsa-asg-8522_st2 | 7.73 | 7.81 | 7.52 | 7.77 | 7.71 | 0.13 | 100 |
| hsa-asg-8520 | hsa-asg-8520_st1 | 10.6 | 10.4 | 10.5 | 10.4 | 10.5 | 0.09 | 100 |
| hsa-asg-8454 | hsa-asg-8454_st1 | 4.24 | 3.52 | 4.38 | 3.82 | 3.99 | 0.40 | 50 |
| hsa-asg-8435 | hsa-asg-8435_st2 | 8.21 | 8.04 | 7.37 | 7.34 | 7.74 | 0.45 | 75 |
| hsa-asg-8316 | hsa-asg-8316_st1 | 10.1 | 9.98 | 10.2 | 10.1 | 10.1 | 0.12 | 100 |
| hsa-asg-8290 | hsa-asg-8290_st1 | 9.19 | 9.14 | 9.12 | 9.31 | 9.19 | 0.09 | 100 |
| hsa-asg-826 | hsa-asg-826_st1 | 10.2 | 9.98 | 10.1 | 10.0 | 10.1 | 0.10 | 100 |
| hsa-asg-8197 | hsa-asg-8197_st2 | 5.31 | 5.11 | 5.21 | 5.38 | 5.25 | 0.12 | 0 |
| hsa-asg-8146 | hsa-asg-8146_st2 | 5.99 | 6.26 | 5.72 | 5.15 | 5.78 | 0.47 | 50 |
| hsa-asg-8137 | hsa-asg-8137_st2 | 6.13 | 6.03 | 5.57 | 5.15 | 5.72 | 0.45 | 75 |
| hsa-asg-8099 | hsa-asg-8099_st2 | 4.71 | 5.14 | 5.01 | 5.83 | 5.17 | 0.48 | 25 |
| hsa-asg-7999 | hsa-asg-7999_st1 | 2.85 | 3.43 | 4.55 | 3.44 | 3.57 | 0.71 | 25 |
| hsa-asg-7946 | hsa-asg-7946_st2 | 4.05 | 4.02 | 2.11 | 3.34 | 3.38 | 0.91 | 25 |
| hsa-asg-786 | hsa-asg-786_st2 | 7.17 | 6.98 | 6.83 | 7.21 | 7.05 | 0.18 | 100 |
| hsa-asg-7782 | hsa-asg-7782_st2 | 10.2 | 9.92 | 10.5 | 10.4 | 10.2 | 0.27 | 100 |
| hsa-asg-7770 | hsa-asg-7770_st2 | 7.05 | 6.94 | 6.56 | 7.23 | 6.94 | 0.28 | 100 |
| hsa-asg-7653 | hsa-asg-7653_st1 | 9.25 | 9.39 | 9.28 | 9.21 | 9.28 | 0.08 | 100 |
| hsa-asg-7579 | hsa-asg-7579_st2 | 8.34 | 8.51 | 8.41 | 8.20 | 8.36 | 0.13 | 100 |
| hsa-asg-7550 | hsa-asg-7550_st1 | 8.04 | 7.85 | 8.29 | 8.18 | 8.09 | 0.19 | 0 |
| hsa-asg-7488 | hsa-asg-7488_st1 | 5.19 | 3.99 | 4.50 | 4.85 | 4.63 | 0.51 | 0 |
| hsa-asg-7450 | hsa-asg-7450_st1 | 10.1 | 10.3 | 10.2 | 10.1 | 10.2 | 0.10 | 100 |
| hsa-asg-7438 | hsa-asg-7438_st2 | 2.08 | 2.28 | 2.82 | 2.15 | 2.33 | 0.34 | 0 |
| hsa-asg-7423 | hsa-asg-7423_st2 | 2.08 | 2.18 | 1.84 | 2.92 | 2.26 | 0.46 | 0 |
| hsa-asg-7422 | hsa-asg-7422_st1 | 3.13 | 2.76 | 2.82 | 2.65 | 2.84 | 0.20 | 0 |
| hsa-asg-7351 | hsa-asg-7351_st2 | 1.54 | 2.83 | 1.00 | 0.89 | 1.56 | 0.89 | 0 |
| hsa-asg-7293 | hsa-asg-7293_st1 | 10.3 | 9.74 | 10.2 | 9.98 | 10.0 | 0.29 | 100 |
| hsa-asg-7292 | hsa-asg-7292_st1 | 9.64 | 9.85 | 10.1 | 9.72 | 9.83 | 0.21 | 100 |
| hsa-asg-723 | hsa-asg-723_st2 | 2.31 | 2.28 | 3.31 | 3.04 | 2.73 | 0.52 | 0 |
| hsa-asg-7213 | hsa-asg-7213_st1 | 9.26 | 10.4 | 9.66 | 9.32 | 9.66 | 0.53 | 100 |
| hsa-asg-7203 | hsa-asg-7203_st1 | 8.26 | 8.28 | 7.84 | 7.50 | 7.97 | 0.37 | 100 |
| hsa-asg-7199 | hsa-asg-7199_st1 | 9.91 | 9.57 | 9.68 | 9.35 | 9.63 | 0.23 | 100 |
| hsa-asg-7166 | hsa-asg-7166_st2 | 6.21 | 6.06 | 6.42 | 6.67 | 6.34 | 0.26 | 50 |
| hsa-asg-7091 | hsa-asg-7091_st1 | 7.41 | 7.80 | 7.51 | 7.90 | 7.65 | 0.23 | 100 |
| hsa-asg-7063 | hsa-asg-7063_st1 | 8.81 | 8.16 | 8.44 | 8.22 | 8.41 | 0.29 | 100 |
| hsa-asg-7027 | hsa-asg-7027_st2 | 7.80 | 8.00 | 7.51 | 7.78 | 7.77 | 0.20 | 25 |
| hsa-asg-6898 | hsa-asg-6898_st2 | 3.13 | 2.45 | 2.90 | 3.04 | 2.88 | 0.30 | 0 |
| hsa-asg-6788 | hsa-asg-6788_st1 | 12.0 | 11.4 | 11.7 | 11.5 | 11.7 | 0.26 | 100 |
| hsa-asg-6773 | hsa-asg-6773_st1 | 4.18 | 3.83 | 4.29 | 2.92 | 3.80 | 0.62 | 0 |
| hsa-asg-6765 | hsa-asg-6765_st1 | 5.78 | 4.92 | 5.65 | 5.76 | 5.53 | 0.41 | 50 |
| hsa-asg-6532 | hsa-asg-6532_st1 | 3.13 | 3.02 | 3.05 | 4.18 | 3.34 | 0.56 | 25 |
| hsa-asg-6503 | hsa-asg-6503_st1 | 3.47 | 3.83 | 3.73 | 3.60 | 3.66 | 0.16 | 0 |
| hsa-asg-6500 | hsa-asg-6500_st1 | 8.14 | 7.90 | 7.83 | 7.48 | 7.83 | 0.27 | 100 |
| hsa-asg-6488 | hsa-asg-6488_st1 | 5.93 | 6.39 | 6.49 | 6.72 | 6.38 | 0.33 | 75 |
| hsa-asg-6449 | hsa-asg-6449_st1 | 3.91 | 5.06 | 5.23 | 2.65 | 4.21 | 1.19 | 50 |
| hsa-asg-641 | hsa-asg-641_st2 | 1.54 | 2.28 | 2.11 | 2.65 | 2.14 | 0.46 | 0 |
| hsa-asg-6383 | hsa-asg-6383_st1 | 8.24 | 8.41 | 8.01 | 8.24 | 8.23 | 0.16 | 0 |
| hsa-asg-6371 | hsa-asg-6371_st2 | 10.9 | 10.8 | 10.6 | 10.9 | 10.8 | 0.16 | 100 |
| hsa-asg-6367 | hsa-asg-6367_st1 | 12.1 | 11.8 | 11.8 | 11.7 | 11.8 | 0.16 | 100 |
| hsa-asg-6346 | hsa-asg-6346_st1 | 9.86 | 9.61 | 9.69 | 9.74 | 9.72 | 0.10 | 100 |
| hsa-asg-6339 | hsa-asg-6339_st1 | 9.95 | 10.0 | 9.64 | 9.73 | 9.85 | 0.21 | 100 |
| hsa-asg-6282 | hsa-asg-6282_st1 | 8.34 | 8.22 | 8.26 | 8.01 | 8.21 | 0.14 | 100 |
| hsa-asg-6211 | hsa-asg-6211_st2 | 9.65 | 9.67 | 9.76 | 9.71 | 9.70 | 0.05 | 100 |
| hsa-asg-6165 | hsa-asg-6165_st2 | 4.57 | 4.35 | 3.48 | 4.18 | 4.14 | 0.47 | 25 |
| hsa-asg-6116 | hsa-asg-6116_st2 | 2.85 | 3.34 | 5.45 | 4.33 | 3.99 | 1.15 | 50 |
| hsa-asg-6071 | hsa-asg-6071_st2 | 6.69 | 6.80 | 6.82 | 6.57 | 6.72 | 0.11 | 100 |
| hsa-asg-6018 | hsa-asg-6018_st2 | 10.3 | 10.3 | 10.2 | 9.98 | 10.2 | 0.17 | 100 |
| hsa-asg-584_st1 | hsa-asg-584_st1 | 3.13 | 3.19 | 2.65 | 1.18 | 2.54 | 0.93 | 0 |
| hsa-asg-5810 | hsa-asg-5810_st2 | 10.0 | 10.1 | 10.0 | 10.3 | 10.1 | 0.13 | 100 |
| hsa-asg-5758 | hsa-asg-5758_st2 | 1.54 | 4.25 | 2.34 | 2.50 | 2.66 | 1.14 | 25 |
| hsa-asg-5691 | hsa-asg-5691_st2 | 9.59 | 9.96 | 9.48 | 9.81 | 9.71 | 0.22 | 100 |
| hsa-asg-551 | hsa-asg-551_st2 | 8.06 | 8.73 | 7.83 | 8.36 | 8.25 | 0.39 | 100 |
| hsa-asg-5326 | hsa-asg-5326_st2 | 8.20 | 7.96 | 8.26 | 7.65 | 8.02 | 0.28 | 100 |
| hsa-asg-529 | hsa-asg-529_st1 | 4.83 | 3.68 | 3.59 | 3.34 | 3.86 | 0.66 | 25 |
| hsa-asg-5240 | hsa-asg-5240_st1 | 3.36 | 3.60 | 3.54 | 3.52 | 3.51 | 0.10 | 75 |
| hsa-asg-5227 | hsa-asg-5227_st1 | 5.16 | 4.22 | 3.64 | 4.38 | 4.35 | 0.63 | 0 |
| hsa-asg-5213 | hsa-asg-5213_st2 | 5.75 | 6.52 | 6.65 | 4.42 | 5.84 | 1.02 | 50 |
| hsa-asg-5208 | hsa-asg-5208_st1 | 8.37 | 8.68 | 8.39 | 8.50 | 8.49 | 0.14 | 100 |
| hsa-asg-5141 | hsa-asg-5141_st1 | 5.92 | 5.67 | 5.80 | 4.74 | 5.53 | 0.54 | 25 |
| hsa-asg-5109 | hsa-asg-5109_st1 | 11.1 | 11.3 | 10.8 | 10.9 | 11.0 | 0.24 | 100 |
| hsa-asg-4974 | hsa-asg-4974_st1 | 1.83 | 2.45 | 2.11 | 2.65 | 2.26 | 0.36 | 0 |
| hsa-asg-497 | hsa-asg-497_st2 | 5.47 | 4.67 | 4.44 | 6.18 | 5.19 | 0.79 | 25 |
| hsa-asg-4844 | hsa-asg-4844_st2 | 9.97 | 9.65 | 10.1 | 9.87 | 9.90 | 0.19 | 100 |
| hsa-asg-4840 | hsa-asg-4840_st1 | 3.75 | 3.24 | 5.05 | 3.60 | 3.91 | 0.79 | 25 |
| hsa-asg-4834 | hsa-asg-4834_st1 | 9.25 | 9.13 | 9.20 | 8.99 | 9.14 | 0.11 | 50 |
| hsa-asg-4828 | hsa-asg-4828_st1 | 10.0 | 9.85 | 9.83 | 10.2 | 10.0 | 0.20 | 100 |
| hsa-asg-4808 | hsa-asg-4808_st1 | 7.81 | 7.40 | 8.09 | 7.38 | 7.67 | 0.35 | 50 |
| hsa-asg-471 | hsa-asg-471_st1 | 10.7 | 10.7 | 10.7 | 10.9 | 10.7 | 0.09 | 100 |
| hsa-asg-4703 | hsa-asg-4703_st2 | 8.16 | 7.55 | 7.02 | 7.61 | 7.59 | 0.46 | 100 |
| hsa-asg-4441 | hsa-asg-4441_st1 | 6.55 | 6.50 | 6.98 | 6.76 | 6.70 | 0.22 | 0 |
| hsa-asg-4426 | hsa-asg-4426_st2 | 5.64 | 5.74 | 4.70 | 5.85 | 5.48 | 0.53 | 100 |
| hsa-asg-4284 | hsa-asg-4284_st1 | 3.83 | 2.61 | 3.31 | 3.34 | 3.28 | 0.50 | 0 |
| hsa-asg-4203 | hsa-asg-4203_st1 | 3.75 | 4.19 | 3.90 | 4.23 | 4.02 | 0.23 | 50 |
| hsa-asg-4164 | hsa-asg-4164_st1 | 3.25 | 3.24 | 3.43 | 3.68 | 3.40 | 0.21 | 0 |
| hsa-asg-4159 | hsa-asg-4159_st2 | 4.12 | 3.96 | 3.73 | 3.75 | 3.89 | 0.18 | 75 |
| hsa-asg-4112 | hsa-asg-4112_st1 | 3.75 | 4.94 | 5.47 | 3.60 | 4.44 | 0.91 | 50 |
| hsa-asg-4077 | hsa-asg-4077_st1 | 2.31 | 2.61 | 1.19 | 2.50 | 2.15 | 0.66 | 0 |
| hsa-asg-4031 | hsa-asg-4031_st2 | 10.2 | 10.2 | 10.4 | 10.0 | 10.2 | 0.15 | 100 |
| hsa-asg-3946 | hsa-asg-3946_st2 | 9.84 | 9.81 | 9.41 | 8.98 | 9.51 | 0.40 | 100 |
| hsa-asg-3728 | hsa-asg-3728_st1 | 8.00 | 7.59 | 7.62 | 7.59 | 7.70 | 0.20 | 25 |
| hsa-asg-3722 | hsa-asg-3722_st1 | 9.77 | 10.2 | 10.0 | 10.0 | 10.0 | 0.19 | 100 |
| hsa-asg-3715 | hsa-asg-3715_st1 | 10.2 | 10.5 | 9.98 | 9.96 | 10.1 | 0.25 | 100 |
| hsa-asg-3703 | hsa-asg-3703_st1 | 11.3 | 11.3 | 10.9 | 11.1 | 11.1 | 0.20 | 100 |
| hsa-asg-3691 | hsa-asg-3691_st1 | 9.68 | 9.76 | 9.68 | 9.23 | 9.59 | 0.24 | 100 |
| hsa-asg-3654 | hsa-asg-3654_st1 | 6.42 | 7.42 | 7.11 | 7.36 | 7.08 | 0.46 | 0 |
| hsa-asg-3565 | hsa-asg-3565_st2 | 8.62 | 8.99 | 9.06 | 9.09 | 8.94 | 0.22 | 25 |
| hsa-asg-3548 | hsa-asg-3548_st1 | 6.58 | 5.86 | 5.75 | 6.60 | 6.20 | 0.46 | 0 |
| hsa-asg-3514 | hsa-asg-3514_st1 | 4.75 | 3.89 | 3.73 | 2.50 | 3.72 | 0.93 | 25 |
| hsa-asg-3290 | hsa-asg-3290_st1 | 9.36 | 9.13 | 9.05 | 9.15 | 9.17 | 0.14 | 50 |
| hsa-asg-3240 | hsa-asg-3240_st1 | 11.5 | 11.7 | 11.7 | 11.7 | 11.7 | 0.14 | 0 |
| hsa-asg-3168 | hsa-asg-3168_st1 | 3.75 | 4.65 | 3.64 | 5.44 | 4.37 | 0.85 | 50 |
| hsa-asg-3118 | hsa-asg-3118_st2 | 3.25 | 4.30 | 2.74 | 2.65 | 3.23 | 0.76 | 25 |
| hsa-asg-3112 | hsa-asg-3112_st1 | 9.58 | 9.35 | 9.79 | 9.32 | 9.51 | 0.22 | 100 |
| hsa-asg-3101 | hsa-asg-3101_st2 | 8.65 | 8.70 | 8.51 | 8.65 | 8.63 | 0.08 | 100 |
| hsa-asg-3083 | hsa-asg-3083_st1 | 4.66 | 3.89 | 2.82 | 4.12 | 3.88 | 0.77 | 25 |
| hsa-asg-3070 | hsa-asg-3070_st2 | 2.08 | 2.96 | 3.43 | 2.50 | 2.74 | 0.58 | 0 |
| hsa-asg-305 | hsa-asg-305_st1 | 1.83 | 2.28 | 2.55 | 2.50 | 2.29 | 0.33 | 0 |
| hsa-asg-3046 | hsa-asg-3046_st2 | 9.42 | 9.36 | 9.10 | 9.30 | 9.30 | 0.14 | 100 |
| hsa-asg-304 | hsa-asg-304_st2 | 7.15 | 6.39 | 6.43 | 5.96 | 6.49 | 0.49 | 100 |
| hsa-asg-3014 | hsa-asg-3014_st2 | 8.29 | 8.39 | 8.19 | 8.25 | 8.28 | 0.08 | 100 |
| hsa-asg-2940 | hsa-asg-2940_st1 | 3.91 | 3.79 | 3.73 | 4.38 | 3.95 | 0.29 | 0 |
| hsa-asg-2930 | hsa-asg-2930_st1 | 2.51 | 2.08 | 2.98 | 2.92 | 2.62 | 0.42 | 0 |
| hsa-asg-2924 | hsa-asg-2924_st1 | 1.83 | 2.76 | 1.36 | −0.02 | 1.48 | 1.16 | 0 |
| hsa-asg-2906 | hsa-asg-2906_st2 | 11.4 | 11.3 | 11.3 | 11.42 | 11.4 | 0.06 | 100 |
| hsa-asg-2886 | hsa-asg-2886_st2 | 7.92 | 8.45 | 7.92 | 7.86 | 8.04 | 0.28 | 100 |
| hsa-asg-2855 | hsa-asg-2855_st2 | 2.51 | 2.61 | 1.84 | 2.33 | 2.32 | 0.34 | 0 |
| hsa-asg-278 | hsa-asg-278_st1 | 9.10 | 8.49 | 8.92 | 8.69 | 8.80 | 0.27 | 25 |
| hsa-asg-2563 | hsa-asg-2563_st2 | 8.80 | 8.96 | 8.84 | 8.82 | 8.86 | 0.07 | 100 |
| hsa-asg-251 | hsa-asg-251_st1 | 4.12 | 3.96 | 3.98 | 4.28 | 4.09 | 0.15 | 75 |
| hsa-asg-247 | hsa-asg-247_st1 | 8.44 | 8.47 | 8.41 | 8.14 | 8.37 | 0.15 | 100 |
| hsa-asg-2459 | hsa-asg-2459_st1 | 2.08 | 2.89 | 2.11 | 2.33 | 2.35 | 0.38 | 0 |
| hsa-asg-2449 | hsa-asg-2449_st1 | 7.65 | 4.55 | 6.35 | 4.42 | 5.74 | 1.55 | 50 |
| hsa-asg-2437 | hsa-asg-2437_st1 | 8.20 | 8.23 | 7.86 | 8.13 | 8.10 | 0.17 | 100 |
| hsa-asg-2433 | hsa-asg-2433_st2 | 4.12 | 4.49 | 3.86 | 4.01 | 4.12 | 0.27 | 25 |
| hsa-asg-2401 | hsa-asg-2401_st2 | 9.50 | 9.28 | 9.27 | 9.34 | 9.35 | 0.11 | 100 |
| hsa-asg-2371 | hsa-asg-2371_st1 | 2.31 | 1.35 | 1.84 | 2.15 | 1.91 | 0.42 | 0 |
| hsa-asg-2232 | hsa-asg-2232_st1 | 1.83 | 1.86 | 2.34 | 1.94 | 1.99 | 0.24 | 0 |
| hsa-asg-2076 | hsa-asg-2076_st1 | 2.08 | 3.13 | 2.74 | 3.25 | 2.80 | 0.53 | 25 |
| hsa-asg-1978 | hsa-asg-1978_st2 | 3.91 | 3.02 | 3.82 | 3.34 | 3.52 | 0.42 | 0 |
| hsa-asg-1974 | hsa-asg-1974_st1 | 2.69 | 2.89 | 2.74 | 2.79 | 2.78 | 0.09 | 0 |
| hsa-asg-1937 | hsa-asg-1937_st1 | 1.83 | 1.05 | 1.19 | 2.92 | 1.75 | 0.85 | 0 |
| hsa-asg-1919 | hsa-asg-1919_st1 | 9.27 | 9.16 | 9.62 | 9.03 | 9.27 | 0.25 | 100 |
| hsa-asg-1886 | hsa-asg-1886_st2 | 11.3 | 10.9 | 11.0 | 10.81 | 11.0 | 0.22 | 100 |
| hsa-asg-1832 | hsa-asg-1832_st2 | 8.01 | 8.54 | 7.95 | 8.21 | 8.18 | 0.27 | 0 |
| hsa-asg-1807 | hsa-asg-1807_st2 | 0.86 | 1.05 | 1.00 | 2.33 | 1.31 | 0.68 | 0 |
| hsa-asg-1797 | hsa-asg-1797_st2 | 9.92 | 9.76 | 9.76 | 9.74 | 9.80 | 0.08 | 100 |
| hsa-asg-1726 | hsa-asg-1726_st1 | 11.0 | 10.9 | 11.0 | 11.16 | 11.0 | 0.10 | 100 |
| hsa-asg-1658 | hsa-asg-1658_st1 | 5.09 | 5.77 | 5.62 | 5.57 | 5.51 | 0.29 | 50 |
| hsa-asg-1557 | hsa-asg-1557_st1 | 3.91 | 3.52 | 4.32 | 3.15 | 3.72 | 0.51 | 25 |
| hsa-asg-1532 | hsa-asg-1532_st1 | 8.62 | 7.73 | 7.82 | 8.25 | 8.10 | 0.41 | 75 |
| hsa-asg-145 | hsa-asg-145_st2 | 10.1 | 10.0 | 9.75 | 9.97 | 9.99 | 0.19 | 100 |
| hsa-asg-1448 | hsa-asg-1448_st1 | 8.17 | 7.58 | 7.79 | 7.17 | 7.68 | 0.42 | 0 |
| hsa-asg-14237 | hsa-asg-14237_st2 | 9.20 | 8.77 | 8.50 | 8.98 | 8.86 | 0.30 | 100 |
| hsa-asg-142 | hsa-asg-142_st1 | 9.64 | 9.46 | 9.08 | 9.20 | 9.35 | 0.25 | 50 |
| hsa-asg-14197 | hsa-asg-14197_st1 | 13.4 | 13.2 | 13.5 | 13.49 | 13.4 | 0.14 | 100 |
| hsa-asg-14189 | hsa-asg-14189_st2 | 14.6 | 14.4 | 14.6 | 14.49 | 14.5 | 0.11 | 100 |
| hsa-asg-14135 | hsa-asg-14135_st1 | 3.36 | 3.83 | 3.19 | 3.68 | 3.51 | 0.29 | 0 |
| hsa-asg-14053 | hsa-asg-14053_st2 | 6.12 | 6.06 | 6.23 | 5.96 | 6.09 | 0.11 | 0 |
| hsa-asg-14029 | hsa-asg-14029_st2 | 7.01 | 6.21 | 6.52 | 6.11 | 6.46 | 0.41 | 100 |
| hsa-asg-14026 | hsa-asg-14026_st1 | 2.99 | 3.13 | 2.55 | 3.75 | 3.11 | 0.50 | 0 |
| hsa-asg-1398 | hsa-asg-1398_st2 | 4.95 | 4.69 | 4.02 | 4.67 | 4.58 | 0.40 | 50 |
| hsa-asg-13973 | hsa-asg-13973_st1 | 7.98 | 7.47 | 8.52 | 8.25 | 8.06 | 0.45 | 50 |
| hsa-asg-13963 | hsa-asg-13963_st2 | 8.75 | 8.70 | 8.45 | 8.04 | 8.48 | 0.32 | 0 |
| hsa-asg-13895 | hsa-asg-13895_st1 | 4.30 | 4.19 | 4.13 | 4.07 | 4.17 | 0.10 | 100 |
| hsa-asg-13808 | hsa-asg-13808_st1 | 3.83 | 4.73 | 3.98 | 5.30 | 4.46 | 0.69 | 50 |
| hsa-asg-13736 | hsa-asg-13736_st2 | 8.87 | 8.80 | 8.62 | 8.60 | 8.72 | 0.13 | 25 |
| hsa-asg-13705 | hsa-asg-13705_st1 | 3.25 | 3.13 | 2.34 | 2.65 | 2.84 | 0.42 | 0 |
| hsa-asg-1369 | hsa-asg-1369_st1 | 1.83 | 1.86 | 2.74 | 1.71 | 2.04 | 0.47 | 0 |
| hsa-asg-13606 | hsa-asg-13606_st2 | 12.1 | 11.7 | 11.8 | 11.80 | 11.9 | 0.19 | 100 |
| hsa-asg-13604 | hsa-asg-13604_st1 | 11.0 | 11.2 | 11.1 | 11.04 | 11.1 | 0.11 | 100 |
| hsa-asg-1360 | hsa-asg-1360_st1 | 9.01 | 8.96 | 8.94 | 8.97 | 8.97 | 0.03 | 25 |
| hsa-asg-13501 | hsa-asg-13501_st1 | 6.56 | 7.42 | 6.40 | 6.08 | 6.62 | 0.57 | 100 |
| hsa-asg-13334 | hsa-asg-13334_st2 | 3.75 | 4.17 | 3.31 | 5.33 | 4.14 | 0.87 | 0 |
| hsa-asg-13306 | hsa-asg-13306_st2 | 12.5 | 12.3 | 12.1 | 12.49 | 12.3 | 0.20 | 100 |
| hsa-asg-13294 | hsa-asg-13294_st2 | 4.52 | 4.51 | 4.20 | 4.47 | 4.42 | 0.15 | 0 |
| hsa-asg-13197 | hsa-asg-13197_st1 | 2.08 | 2.28 | 2.34 | 4.01 | 2.68 | 0.89 | 0 |
| hsa-asg-13083 | hsa-asg-13083_st1 | 9.50 | 9.54 | 8.85 | 9.40 | 9.32 | 0.32 | 50 |
| hsa-asg-12922 | hsa-asg-12922_st1 | 6.94 | 7.41 | 6.34 | 7.19 | 6.97 | 0.47 | 100 |
| hsa-asg-1270 | hsa-asg-1270_st2 | 3.75 | 5.31 | 3.73 | 3.68 | 4.12 | 0.80 | 25 |
| hsa-asg-12687 | hsa-asg-12687_st1 | 9.08 | 8.92 | 9.07 | 9.37 | 9.11 | 0.19 | 50 |
| hsa-asg-12602 | hsa-asg-12602_st1 | 1.54 | 1.62 | 1.53 | 1.94 | 1.66 | 0.19 | 0 |
| hsa-asg-12556 | hsa-asg-12556_st1 | 10.9 | 10.7 | 10.4 | 10.33 | 10.6 | 0.26 | 100 |
| hsa-asg-12549 | hsa-asg-12549_st1 | 3.66 | 4.94 | 2.34 | 3.34 | 3.57 | 1.07 | 25 |
| hsa-asg-12531 | hsa-asg-12531_st1 | 6.76 | 4.32 | 4.85 | 5.04 | 5.24 | 1.05 | 25 |
| hsa-asg-12463 | hsa-asg-12463_st2 | 1.83 | 2.08 | 1.84 | 1.94 | 1.92 | 0.12 | 0 |
| hsa-asg-12461 | hsa-asg-12461_st1 | 0.86 | 1.86 | 1.84 | 2.33 | 1.72 | 0.62 | 0 |
| hsa-asg-12460 | hsa-asg-12460_st2 | 7.92 | 8.60 | 8.95 | 8.51 | 8.49 | 0.42 | 100 |
| hsa-asg-12441 | hsa-asg-12441_st1 | 11.0 | 10.8 | 10.8 | 10.80 | 10.8 | 0.13 | 100 |
| hsa-asg-12421 | hsa-asg-12421_st1 | 9.94 | 10.1 | 9.58 | 9.73 | 9.86 | 0.26 | 100 |
| hsa-asg-12356 | hsa-asg-12356_st1 | 9.24 | 8.90 | 9.06 | 9.24 | 9.11 | 0.17 | 100 |
| hsa-asg-12344 | hsa-asg-12344_st1 | 10.1 | 9.65 | 9.57 | 9.56 | 9.75 | 0.30 | 50 |
| hsa-asg-12343 | hsa-asg-12343_st1 | 7.32 | 6.59 | 6.82 | 6.26 | 6.75 | 0.44 | 100 |
| hsa-asg-12320 | hsa-asg-12320_st2 | 2.51 | 2.54 | 1.53 | 3.34 | 2.48 | 0.74 | 0 |
| hsa-asg-12286 | hsa-asg-12286_st2 | 9.32 | 9.24 | 8.82 | 8.67 | 9.01 | 0.32 | 50 |
| hsa-asg-12150 | hsa-asg-12150_st1 | 10.9 | 10.9 | 11.0 | 10.56 | 10.8 | 0.19 | 100 |
| hsa-asg-12045 | hsa-asg-12045_st2 | 3.25 | 2.83 | 3.98 | 3.89 | 3.49 | 0.55 | 0 |
| hsa-asg-12005 | hsa-asg-12005_st1 | 9.84 | 9.22 | 9.59 | 9.42 | 9.52 | 0.26 | 100 |
| hsa-asg-11973 | hsa-asg-11973_st2 | 9.02 | 8.75 | 9.27 | 8.65 | 8.92 | 0.28 | 25 |
| hsa-asg-11969 | hsa-asg-11969_st1 | 8.89 | 8.78 | 8.42 | 8.82 | 8.73 | 0.21 | 25 |
| hsa-asg-11956 | hsa-asg-11956_st1 | 8.71 | 8.42 | 8.38 | 8.20 | 8.43 | 0.21 | 0 |
| hsa-asg-11945 | hsa-asg-11945_st1 | 10.0 | 9.87 | 9.64 | 9.70 | 9.81 | 0.18 | 100 |
| hsa-asg-11931 | hsa-asg-11931_st1 | 3.47 | 4.67 | 3.86 | 2.92 | 3.73 | 0.74 | 0 |
| hsa-asg-11930 | hsa-asg-11930_st1 | 4.83 | 5.36 | 5.09 | 5.88 | 5.29 | 0.45 | 100 |
| hsa-asg-11898 | hsa-asg-11898_st2 | 7.87 | 8.08 | 7.50 | 7.76 | 7.80 | 0.24 | 100 |
| hsa-asg-1189 | hsa-asg-1189_st1 | 7.61 | 9.05 | 8.28 | 8.12 | 8.26 | 0.60 | 75 |
| hsa-asg-11877 | hsa-asg-11877_st1 | 7.07 | 6.75 | 6.47 | 6.82 | 6.78 | 0.24 | 0 |
| hsa-asg-11797 | hsa-asg-11797_st1 | 8.12 | 8.21 | 8.34 | 7.84 | 8.13 | 0.21 | 0 |
| hsa-asg-1174 | hsa-asg-1174_st2 | 9.88 | 9.61 | 9.72 | 9.65 | 9.72 | 0.12 | 100 |
| hsa-asg-11643 | hsa-asg-11643_st1 | 2.69 | 2.89 | 3.19 | 3.15 | 2.98 | 0.23 | 0 |
| hsa-asg-11623 | hsa-asg-11623_st1 | 11.6 | 11.2 | 11.5 | 11.33 | 11.4 | 0.16 | 0 |
| hsa-asg-11617 | hsa-asg-11617_st2 | 10.0 | 10.5 | 10.3 | 10.49 | 10.3 | 0.24 | 100 |
| hsa-asg-11612 | hsa-asg-11612_st1 | 7.82 | 7.99 | 7.93 | 7.89 | 7.91 | 0.07 | 0 |
| hsa-asg-11606 | hsa-asg-11606_st1 | 11.3 | 11.1 | 11.5 | 11.13 | 11.3 | 0.18 | 100 |
| hsa-asg-11580 | hsa-asg-11580_st2 | 1.54 | 1.62 | 2.55 | 2.50 | 2.05 | 0.55 | 0 |
| hsa-asg-11555 | hsa-asg-11555_st2 | 4.75 | 4.84 | 3.90 | 4.59 | 4.52 | 0.42 | 75 |
| hsa-asg-11521 | hsa-asg-11521_st1 | 9.76 | 9.35 | 8.96 | 8.91 | 9.25 | 0.39 | 75 |
| hsa-asg-11513 | hsa-asg-11513_st1 | 9.28 | 9.57 | 9.48 | 9.26 | 9.40 | 0.15 | 75 |
| hsa-asg-11193 | hsa-asg-11193_st1 | 12.2 | 12.2 | 11.9 | 11.98 | 12.1 | 0.17 | 75 |
| hsa-asg-11128 | hsa-asg-11128_st2 | 4.05 | 3.89 | 3.73 | 4.33 | 4.00 | 0.25 | 50 |
| hsa-asg-11112 | hsa-asg-11112_st2 | 11.5 | 11.2 | 11.4 | 11.39 | 11.4 | 0.13 | 100 |
| hsa-asg-11002 | hsa-asg-11002_st2 | 3.47 | 2.37 | 3.37 | 3.68 | 3.22 | 0.58 | 0 |
| hsa-asg-10958 | hsa-asg-10958_st2 | 1.54 | 2.37 | 2.34 | 2.50 | 2.19 | 0.44 | 0 |
| hsa-asg-10901 | hsa-asg-10901_st1 | 7.24 | 6.90 | 7.15 | 6.89 | 7.04 | 0.18 | 100 |
| hsa-asg-10810 | hsa-asg-10810_st1 | 3.36 | 3.43 | 3.82 | 3.34 | 3.49 | 0.22 | 0 |
| hsa-asg-1072 | hsa-asg-1072_st1 | 2.08 | 3.43 | 2.55 | 3.89 | 2.99 | 0.82 | 50 |
| hsa-asg-10639 | hsa-asg-10639_st1 | 11.7 | 11.9 | 11.7 | 11.59 | 11.7 | 0.12 | 100 |
| hsa-asg-10517 | hsa-asg-10517_st2 | 1.83 | 2.18 | 1.36 | 2.65 | 2.01 | 0.54 | 0 |
| hsa-asg-105 | hsa-asg-105_st1 | 3.36 | 4.17 | 3.25 | 2.33 | 3.28 | 0.75 | 0 |
| hsa-asg-10487 | hsa-asg-10487_st1 | 3.25 | 4.22 | 6.37 | 4.47 | 4.58 | 1.30 | 25 |
| hsa-asg-10486 | hsa-asg-10486_st2 | 2.69 | 3.13 | 3.31 | 2.50 | 2.91 | 0.38 | 50 |
| hsa-asg-10464 | hsa-asg-10464_st2 | 2.69 | 3.43 | 5.40 | 4.91 | 4.11 | 1.26 | 50 |
| hsa-asg-10392 | hsa-asg-10392_st1 | 10.5 | 9.84 | 10.0 | 10.02 | 10.1 | 0.30 | 100 |
| hsa-asg-10280 | hsa-asg-10280_st1 | 2.31 | 3.60 | 2.74 | 3.82 | 3.12 | 0.71 | 0 |
| hsa-asg-10278 | hsa-asg-10278_st2 | 2.51 | 2.08 | 2.55 | 2.33 | 2.37 | 0.21 | 0 |
| hsa-asg-1026 | hsa-asg-1026_st2 | 5.47 | 5.58 | 5.74 | 5.85 | 5.66 | 0.17 | 100 |
| hsa-asg-10247 | hsa-asg-10247_st1 | 2.08 | 2.45 | 2.11 | 1.94 | 2.15 | 0.22 | 0 |
| hsa-asg-1020 | hsa-asg-1020_st2 | 8.76 | 8.76 | 8.67 | 8.46 | 8.66 | 0.14 | 0 |
| hsa-asg-1018 | hsa-asg-1018_st2 | 6.18 | 6.90 | 6.65 | 6.67 | 6.60 | 0.30 | 100 |
| hsa-asg-10131 | hsa-asg-10131_st2 | 3.57 | 3.13 | 4.32 | 3.34 | 3.59 | 0.52 | 25 |
| hsa-miR-224 | hsa-asg-14247_st1 | 5.02 | 4.65 | 5.53 | 5.98 | 5.30 | 0.58 | 100 |
| hsa-miR-99b | hsa-asg-14196_st2 | 8.48 | 8.15 | 8.73 | 8.43 | 8.45 | 0.24 | 0 |

| | | | | | | | LNpos vs LNneg | | |
|---|---|---|---|---|---|---|---|---|---|
| | LNpos | | | | | | | | Fold |
| MicroRNA | 2 | 3 | 4 | Mean | SD | % | ttest | Log2Diff | Change |
| hsa-let-7e | 10.6 | 11.2 | 11.0 | 11.0 | 0.28 | 100 | 1.36E−02 | 0.90 | 2 |
| hsa-miR-103 | 11.3 | 12.7 | 12.0 | 12.0 | 0.66 | 100 | 3.39E−02 | 1.03 | 2 |
| hsa-miR-106b | 9.40 | 9.81 | 9.37 | 9.53 | 0.25 | 100 | 2.68E−03 | 2.09 | 4 |
| hsa-miR-107 | 11.1 | 12.5 | 11.9 | 11.8 | 0.68 | 100 | 3.05E−02 | 1.15 | 2 |
| hsa-miR-128a | 7.58 | 8.49 | 7.24 | 7.77 | 0.65 | 100 | 3.17E−02 | 1.58 | 3 |
| hsa-miR-130b | 6.61 | 7.49 | 7.70 | 7.27 | 0.58 | 100 | 2.09E−02 | 1.11 | 2 |
| hsa-miR-141 | 7.90 | 10.2 | 8.68 | 8.93 | 1.18 | 100 | 1.58E−04 | 7.05 | 132 |
| hsa-miR-145 | 11.9 | 11.1 | 12.0 | 11.7 | 0.49 | 100 | 4.96E−02 | −0.70 | 2 |
| hsa-miR-148a | 11.2 | 10.0 | 10.4 | 10.5 | 0.63 | 100 | 5.54E−03 | 2.12 | 4 |
| hsa-miR-148b | 6.16 | 8.19 | 7.87 | 7.41 | 1.09 | 100 | 3.58E−02 | 2.10 | 4 |
| hsa-miR-151 | 7.14 | 8.42 | 7.83 | 7.80 | 0.64 | 100 | 2.88E−02 | 1.28 | 2 |
| hsa-miR-181a | 10.0 | 11.2 | 10.4 | 10.5 | 0.62 | 100 | 3.76E−02 | 1.10 | 2 |
| hsa-miR-181a* | 6.37 | 7.12 | 6.81 | 6.77 | 0.38 | 100 | 3.17E−02 | 3.22 | 9 |
| hsa-miR-181d | 6.77 | 8.72 | 6.91 | 7.47 | 1.09 | 100 | 2.47E−03 | 3.24 | 9 |
| hsa-miR-182 | 8.25 | 11.0 | 11.0 | 10.0 | 1.60 | 100 | 6.82E−04 | 6.39 | 84 |
| hsa-miR-183 | 3.60 | 8.39 | 7.97 | 6.65 | 2.65 | 67 | 2.56E−02 | 4.36 | 21 |
| hsa-miR-189 | 2.26 | 4.83 | 2.85 | 3.32 | 1.35 | 0 | 3.76E−02 | 2.15 | 4 |
| hsa-miR-191 | 12.2 | 12.3 | 13.0 | 12.5 | 0.45 | 100 | 8.79E−03 | 1.20 | 2 |
| hsa-miR-193b | 9.82 | 9.91 | 10.8 | 10.1 | 0.55 | 100 | 1.07E−02 | 2.10 | 4 |
| hsa-miR-196a | 8.79 | 10.4 | 8.12 | 9.12 | 1.19 | 100 | 3.55E−03 | 6.25 | 76 |
| hsa-miR-199a | 9.75 | 10.7 | 10.9 | 10.4 | 0.62 | 100 | 2.47E−02 | 1.04 | 2 |
| hsa-miR-200a | 9.05 | 8.38 | 10.2 | 9.22 | 0.93 | 100 | 3.29E−05 | 6.75 | 107 |
| hsa-miR-200a* | 6.26 | 5.13 | 5.18 | 5.52 | 0.64 | 33 | 1.64E−02 | 2.08 | 4 |
| hsa-miR-200b | 11.2 | 9.92 | 11.7 | 10.9 | 0.91 | 100 | 3.45E−05 | 8.33 | 322 |
| hsa-miR-200c | 11.4 | 12.6 | 11.2 | 11.7 | 0.77 | 100 | 3.18E−04 | 5.79 | 56 |
| hsa-miR-203 | 7.23 | 7.97 | 8.59 | 7.93 | 0.68 | 100 | 8.39E−05 | 4.98 | 32 |
| hsa-miR-21 | 11.9 | 14.0 | 13.8 | 13.2 | 1.18 | 100 | 7.59E−03 | 2.81 | 7 |
| hsa-miR-218 | 5.60 | 3.48 | 6.34 | 5.14 | 1.48 | 67 | 4.95E−02 | 2.58 | 6 |
| hsa-miR-22 | 9.74 | 10.8 | 10.8 | 10.4 | 0.63 | 100 | 7.20E−03 | 1.40 | 3 |
| hsa-miR-224 | 6.32 | 8.37 | 10.3 | 8.34 | 2.01 | 100 | 3.74E−02 | 3.03 | 8 |
| hsa-miR-24 | 10.9 | 12.2 | 11.6 | 11.6 | 0.62 | 100 | 4.48E−02 | 1.05 | 2 |
| hsa-miR-25 | 10.7 | 10.7 | 10.9 | 10.8 | 0.10 | 100 | 1.62E−04 | 1.01 | 2 |
| hsa-miR-27a | 9.53 | 10.7 | 10.4 | 10.2 | 0.65 | 100 | 6.67E−03 | 1.61 | 3 |
| hsa-miR-30a-3p | 7.36 | 8.29 | 8.44 | 8.03 | 0.59 | 100 | 8.88E−03 | 2.26 | 5 |
| hsa-miR-30a-5p | 10.3 | 11.4 | 11.1 | 10.9 | 0.60 | 100 | 1.17E−02 | 1.23 | 2 |
| hsa-miR-30e-5p | 8.48 | 9.66 | 10.1 | 9.43 | 0.85 | 100 | 4.47E−02 | 1.26 | 2 |
| hsa-miR-34a | 7.55 | 8.07 | 8.89 | 8.17 | 0.68 | 100 | 3.24E−02 | 1.61 | 3 |
| hsa-miR-34b | 3.95 | 6.05 | 6.12 | 5.37 | 1.23 | 67 | 5.12E−03 | 2.93 | 8 |
| hsa-miR-363 | 7.24 | 7.92 | 7.75 | 7.64 | 0.35 | 100 | 2.29E−02 | 0.95 | 2 |
| hsa-miR-373* | 6.95 | 7.23 | 7.39 | 7.19 | 0.23 | 100 | 2.26E−02 | −0.54 | 1 |
| hsa-miR-375 | 10.7 | 10.4 | 10.2 | 10.4 | 0.23 | 100 | 1.60E−03 | 8.35 | 325 |
| hsa-miR-376a | 4.53 | 2.71 | 3.63 | 3.62 | 0.91 | 33 | 1.05E−02 | 1.87 | 4 |
| hsa-miR-421 | 5.06 | 6.36 | 6.43 | 5.95 | 0.78 | 100 | 1.38E−03 | 3.57 | 12 |
| hsa-miR-425-5p | 9.73 | 10.8 | 11.2 | 10.6 | 0.78 | 100 | 2.38E−03 | 2.24 | 5 |
| hsa-miR-429 | 7.13 | 5.83 | 7.50 | 6.82 | 0.88 | 100 | 3.32E−03 | 4.05 | 17 |
| hsa-miR-452 | 6.66 | 6.23 | 7.38 | 6.76 | 0.58 | 100 | 1.30E−02 | 1.80 | 3 |
| hsa-miR-489 | 7.99 | 4.71 | 3.83 | 5.51 | 2.20 | 33 | 4.02E−02 | 3.13 | 9 |
| hsa-miR-508 | 4.90 | 4.37 | 5.33 | 4.87 | 0.48 | 67 | 1.63E−02 | 1.29 | 2 |
| hsa-miR-539 | 1.41 | 2.02 | 1.36 | 1.60 | 0.37 | 0 | 4.23E−02 | −0.56 | 1 |
| hsa-miR-542-5p | 5.26 | 5.21 | 5.09 | 5.19 | 0.09 | 0 | 9.84E−04 | 3.64 | 12 |
| hsa-miR-654 | 6.26 | 6.84 | 6.53 | 6.54 | 0.29 | 0 | 4.55E−02 | −0.98 | 2 |
| hsa-miR-93 | 9.41 | 8.57 | 9.64 | 9.21 | 0.56 | 100 | 4.95E−03 | 1.41 | 3 |
| hsa-miR-98 | 7.23 | 8.80 | 7.48 | 7.83 | 0.84 | 100 | 1.99E−02 | 1.63 | 3 |
| hsa-miR-99b | 9.34 | 9.87 | 9.37 | 9.53 | 0.29 | 0 | 1.53E−03 | 1.21 | 2 |
| hsa-asg-9769 | 4.17 | 4.46 | 5.82 | 4.82 | 0.88 | 33 | 9.26E−03 | 2.08 | 4 |
| hsa-asg-8901 | 12.3 | 12.4 | 12.6 | 12.4 | 0.15 | 100 | 2.52E−02 | 0.26 | 1 |
| hsa-asg-860 | 3.00 | 3.79 | 3.23 | 3.34 | 0.41 | 0 | 4.07E−02 | 0.69 | 2 |
| hsa-asg-6457 | 3.00 | 2.40 | 1.79 | 2.40 | 0.61 | 0 | 4.07E−02 | −0.93 | 2 |
| hsa-asg-5021 | 2.48 | 4.55 | 4.79 | 3.94 | 1.27 | 0 | 3.68E−02 | 1.91 | 4 |
| hsa-asg-14175 | 3.00 | 3.72 | 4.46 | 3.73 | 0.73 | 33 | 1.66E−02 | 1.35 | 3 |
| hsa-asg-13258 | 6.93 | 6.94 | 6.99 | 6.95 | 0.04 | 100 | 3.47E−02 | 1.40 | 3 |
| hsa-asg-13254 | 4.98 | 4.46 | 6.43 | 5.29 | 1.02 | 33 | 3.56E−02 | 2.72 | 7 |
| hsa-asg-13205 | 5.09 | 6.99 | 6.49 | 6.19 | 0.99 | 67 | 6.74E−03 | 2.87 | 7 |
| hsa-asg-12885 | 3.95 | 3.79 | 3.94 | 3.90 | 0.09 | 100 | 2.35E−04 | 1.00 | 2 |
| hsa-asg-12471 | 2.26 | 2.71 | 2.99 | 2.66 | 0.37 | 0 | 3.94E−02 | 0.62 | 2 |
| hsa-asg-12372 | 10.7 | 10.6 | 10.6 | 10.6 | 0.05 | 100 | 4.22E−03 | 0.32 | 1 |
| hsa-asg-11896 | 12.3 | 12.1 | 12.0 | 12.1 | 0.16 | 100 | 3.91E−02 | 0.33 | 1 |
| hsa-asg-11527 | 3.39 | 4.37 | 4.36 | 4.04 | 0.56 | 67 | 6.17E−03 | 1.50 | 3 |
| hsa-asg-11515 | 9.39 | 9.64 | 9.77 | 9.60 | 0.20 | 100 | 1.29E−02 | −0.54 | 1 |
| hsa-asg-114 | 6.40 | 6.93 | 6.82 | 6.72 | 0.28 | 0 | 3.06E−02 | −0.66 | 2 |
| hsa-asg-10065 | 3.39 | 2.98 | 3.12 | 3.16 | 0.21 | 0 | 2.43E−03 | 0.82 | 2 |
| hsa-miR-594 | 11.6 | 11.8 | 11.6 | 11.6 | 0.10 | 100 | 2.35E−02 | 0.46 | 1 |
| hsa-miR246 | 5.23 | 5.62 | 5.90 | 5.58 | 0.34 | 100 | 3.67E−02 | 1.20 | 2 |
| hsa-miR181 | 2.67 | 2.85 | 2.70 | 2.74 | 0.10 | 0 | 2.58E−02 | −1.11 | 2 |
| hsa-asg-999 | 6.77 | 6.99 | 7.17 | 6.98 | 0.20 | 100 | 2.40E−02 | 0.74 | 2 |
| hsa-asg-9951 | 4.30 | 5.72 | 4.14 | 4.72 | 0.87 | 33 | 4.39E−02 | 2.04 | 4 |
| hsa-asg-9885 | 5.96 | 5.96 | 5.89 | 5.94 | 0.04 | 100 | 4.67E−04 | −1.08 | 2 |
| hsa-asg-9856 | 3.95 | 3.09 | 5.04 | 4.03 | 0.98 | 33 | 2.72E−02 | 2.18 | 5 |
| hsa-asg-9795 | 4.10 | 4.95 | 3.63 | 4.23 | 0.67 | 0 | 4.36E−03 | −1.64 | 3 |
| hsa-asg-9714 | 2.26 | 2.22 | 2.62 | 2.37 | 0.22 | 0 | 4.58E−02 | −1.63 | 3 |
| hsa-asg-9687 | 2.02 | 2.22 | 1.91 | 2.05 | 0.16 | 0 | 1.75E−03 | 0.73 | 2 |
| hsa-asg-9627 | 9.40 | 9.02 | 9.55 | 9.32 | 0.28 | 100 | 2.79E−02 | −0.52 | 1 |
| hsa-asg-960 | 7.51 | 8.79 | 8.27 | 8.19 | 0.65 | 67 | 4.78E−02 | −1.04 | 2 |
| hsa-asg-9530 | 12.7 | 12.7 | 12.7 | 12.7 | 0.02 | 100 | 2.47E−03 | 0.07 | 1 |
| hsa-asg-9521 | 2.84 | 3.72 | 3.63 | 3.40 | 0.48 | 0 | 2.16E−02 | 1.10 | 2 |
| hsa-asg-9484 | 9.30 | 9.86 | 9.41 | 9.52 | 0.29 | 100 | 1.14E−02 | −0.58 | 1 |
| hsa-asg-9474 | 4.30 | 4.50 | 4.49 | 4.43 | 0.11 | 0 | 4.76E−02 | −0.43 | 1 |
| hsa-asg-9457 | 11.8 | 11.8 | 11.7 | 11.8 | 0.04 | 100 | 1.37E−04 | −0.52 | 1 |
| hsa-asg-944 | 4.48 | 3.93 | 3.54 | 3.98 | 0.47 | 33 | 2.00E−02 | 0.93 | 2 |
| hsa-asg-9386 | 10.5 | 10.4 | 10.5 | 10.5 | 0.05 | 100 | 4.74E−02 | −0.32 | 1 |
| hsa-asg-9297 | 6.44 | 4.78 | 5.66 | 5.63 | 0.83 | 67 | 6.90E−03 | 2.08 | 4 |
| hsa-asg-9262 | 8.60 | 8.57 | 8.65 | 8.61 | 0.04 | 100 | 1.49E−03 | 0.91 | 2 |
| hsa-asg-9261 | 12.8 | 12.7 | 12.8 | 12.8 | 0.04 | 100 | 4.62E−02 | 0.42 | 1 |
| hsa-asg-9238 | 8.94 | 8.98 | 8.75 | 8.89 | 0.12 | 100 | 3.74E−02 | −0.50 | 1 |
| hsa-asg-9185 | 8.61 | 8.81 | 8.92 | 8.78 | 0.16 | 100 | 3.06E−02 | −0.45 | 1 |
| hsa-asg-9164 | 7.12 | 7.21 | 7.23 | 7.19 | 0.06 | 33 | 2.57E−02 | −0.77 | 2 |
| hsa-asg-916 | 9.68 | 9.56 | 9.34 | 9.52 | 0.17 | 100 | 2.26E−02 | −0.42 | 1 |
| hsa-asg-9146 | 13.1 | 13.0 | 13.2 | 13.1 | 0.12 | 100 | 2.90E−02 | 0.33 | 1 |
| hsa-asg-9078 | 10.9 | 11.2 | 11.0 | 11.0 | 0.15 | 0 | 2.13E−02 | −0.49 | 1 |
| hsa-asg-907 | 8.59 | 8.05 | 8.12 | 8.25 | 0.29 | 100 | 1.70E−02 | 0.76 | 2 |
| hsa-asg-8957 | 8.70 | 8.53 | 8.93 | 8.72 | 0.20 | 100 | 1.28E−03 | −0.76 | 2 |
| hsa-asg-8953 | 11.2 | 10.8 | 10.7 | 10.9 | 0.27 | 100 | 2.59E−02 | 0.49 | 1 |
| hsa-asg-8941 | 8.58 | 8.61 | 8.95 | 8.72 | 0.21 | 67 | 4.49E−02 | −0.54 | 1 |
| hsa-asg-8932 | 5.92 | 5.79 | 6.18 | 5.96 | 0.20 | 100 | 2.08E−02 | −1.01 | 2 |
| hsa-asg-8928 | 7.68 | 7.75 | 7.41 | 7.61 | 0.18 | 0 | 1.10E−02 | −0.50 | 1 |
| hsa-asg-88 | 11.1 | 11.2 | 11.2 | 11.2 | 0.05 | 0 | 5.80E−04 | −0.58 | 1 |
| hsa-asg-8736 | 4.17 | 2.57 | 3.94 | 3.56 | 0.87 | 0 | 1.19E−02 | −2.12 | 4 |
| hsa-asg-8732 | 6.73 | 7.70 | 7.48 | 7.30 | 0.51 | 0 | 1.22E−02 | −1.16 | 2 |
| hsa-asg-8617 | 10.5 | 11.1 | 10.6 | 10.7 | 0.28 | 100 | 4.45E−02 | 0.67 | 2 |
| hsa-asg-8546 | 7.09 | 6.53 | 7.70 | 7.11 | 0.59 | 33 | 3.43E−02 | −1.43 | 3 |
| hsa-asg-8522 | 7.45 | 6.86 | 6.92 | 7.08 | 0.33 | 100 | 1.53E−02 | −0.63 | 2 |
| hsa-asg-8520 | 10.1 | 9.91 | 10.2 | 10.1 | 0.19 | 100 | 1.08E−02 | −0.41 | 1 |
| hsa-asg-8454 | 5.38 | 4.63 | 4.65 | 4.89 | 0.43 | 100 | 3.55E−02 | 0.90 | 2 |
| hsa-asg-8435 | 7.19 | 6.21 | 6.96 | 6.78 | 0.51 | 0 | 4.67E−02 | −0.95 | 2 |
| hsa-asg-8316 | 9.53 | 9.67 | 9.92 | 9.71 | 0.20 | 100 | 1.47E−02 | −0.43 | 1 |
| hsa-asg-8290 | 8.56 | 8.71 | 8.34 | 8.54 | 0.18 | 100 | 1.40E−03 | −0.65 | 2 |
| hsa-asg-826 | 9.67 | 9.35 | 9.81 | 9.61 | 0.24 | 100 | 1.18E−02 | −0.50 | 1 |
| hsa-asg-8197 | 5.88 | 5.72 | 5.38 | 5.66 | 0.25 | 67 | 3.40E−02 | 0.41 | 1 |
| hsa-asg-8146 | 6.95 | 6.42 | 7.72 | 7.03 | 0.65 | 100 | 3.14E−02 | 1.25 | 2 |
| hsa-asg-8137 | 6.72 | 6.70 | 7.22 | 6.88 | 0.29 | 100 | 1.21E−02 | 1.16 | 2 |
| hsa-asg-8099 | 2.84 | 3.76 | 4.01 | 3.54 | 0.61 | 0 | 1.03E−02 | −1.63 | 3 |
| hsa-asg-7999 | 5.47 | 5.01 | 4.89 | 5.12 | 0.31 | 100 | 1.75E−02 | 1.56 | 3 |
| hsa-asg-7946 | 2.02 | 1.80 | 1.91 | 1.91 | 0.11 | 0 | 4.15E−02 | −1.47 | 3 |
| hsa-asg-786 | 5.67 | 6.49 | 6.48 | 6.21 | 0.47 | 67 | 2.01E−02 | −0.84 | 2 |
| hsa-asg-7782 | 10.9 | 11.5 | 11.0 | 11.1 | 0.35 | 100 | 1.14E−02 | 0.91 | 2 |
| hsa-asg-7770 | 7.57 | 7.77 | 7.35 | 7.56 | 0.21 | 100 | 2.51E−02 | 0.62 | 2 |
| hsa-asg-7653 | 9.00 | 9.21 | 9.01 | 9.07 | 0.12 | 100 | 3.92E−02 | −0.21 | 1 |
| hsa-asg-7579 | 7.48 | 7.63 | 7.83 | 7.65 | 0.17 | 100 | 1.48E−03 | −0.72 | 2 |
| hsa-asg-7550 | 9.06 | 8.82 | 8.70 | 8.86 | 0.19 | 100 | 3.04E−03 | 0.77 | 2 |
| hsa-asg-7488 | 6.19 | 5.36 | 6.58 | 6.05 | 0.62 | 67 | 2.12E−02 | 1.42 | 3 |
| hsa-asg-7450 | 9.22 | 9.81 | 9.53 | 9.52 | 0.30 | 100 | 6.31E−03 | −0.70 | 2 |
| hsa-asg-7438 | 6.34 | 4.81 | 5.54 | 5.56 | 0.76 | 67 | 5.78E−04 | 3.23 | 9 |
| hsa-asg-7423 | 3.79 | 3.09 | 3.44 | 3.44 | 0.35 | 0 | 1.43E−02 | 1.19 | 2 |
| hsa-asg-7422 | 3.50 | 3.57 | 3.18 | 3.41 | 0.21 | 0 | 1.46E−02 | 0.58 | 1 |
| hsa-asg-7351 | 4.03 | 5.82 | 3.12 | 4.32 | 1.37 | 33 | 2.26E−02 | 2.76 | 7 |
| hsa-asg-7293 | 9.67 | 9.54 | 9.62 | 9.61 | 0.07 | 100 | 4.01E−02 | −0.48 | 1 |
| hsa-asg-7292 | 9.52 | 9.14 | 9.18 | 9.28 | 0.21 | 100 | 1.74E−02 | −0.55 | 1 |
| hsa-asg-723 | 3.60 | 4.27 | 4.20 | 4.02 | 0.37 | 33 | 1.52E−02 | 1.29 | 2 |
| hsa-asg-7213 | 9.25 | 8.05 | 8.26 | 8.52 | 0.64 | 100 | 4.83E−02 | −1.14 | 2 |
| hsa-asg-7203 | 6.81 | 7.00 | 7.42 | 7.08 | 0.31 | 33 | 2.01E−02 | −0.89 | 2 |
| hsa-asg-7199 | 9.05 | 9.37 | 8.96 | 9.13 | 0.21 | 100 | 3.33E−02 | −0.50 | 1 |
| hsa-asg-7166 | 3.27 | 5.10 | 5.03 | 4.47 | 1.04 | 0 | 1.59E−02 | −1.87 | 4 |
| hsa-asg-7091 | 6.09 | 6.88 | 6.54 | 6.50 | 0.40 | 67 | 4.64E−03 | −1.15 | 2 |
| hsa-asg-7063 | 7.62 | 7.97 | 7.35 | 7.65 | 0.31 | 100 | 2.16E−02 | −0.76 | 2 |
| hsa-asg-7027 | 7.23 | 7.01 | 7.61 | 7.28 | 0.30 | 33 | 4.79E−02 | −0.49 | 1 |
| hsa-asg-6898 | 4.10 | 4.88 | 5.46 | 4.81 | 0.68 | 67 | 3.49E−03 | 1.93 | 4 |
| hsa-asg-6788 | 12.3 | 11.9 | 12.2 | 12.1 | 0.17 | 100 | 4.61E−02 | 0.46 | 1 |
| hsa-asg-6773 | 5.26 | 4.92 | 4.63 | 4.93 | 0.32 | 33 | 3.69E−02 | 1.13 | 2 |
| hsa-asg-6765 | 4.77 | 4.65 | 4.60 | 4.67 | 0.09 | 0 | 1.76E−02 | −0.85 | 2 |
| hsa-asg-6532 | 4.58 | 4.37 | 4.14 | 4.36 | 0.22 | 67 | 3.27E−02 | 1.02 | 2 |
| hsa-asg-6503 | 4.17 | 4.11 | 4.46 | 4.25 | 0.19 | 0 | 6.10E−03 | 0.59 | 2 |
| hsa-asg-6500 | 8.29 | 8.34 | 8.36 | 8.33 | 0.04 | 100 | 2.72E−02 | 0.50 | 1 |
| hsa-asg-6488 | 6.90 | 7.17 | 7.60 | 7.22 | 0.36 | 100 | 2.35E−02 | 0.84 | 2 |
| hsa-asg-6449 | 1.73 | 2.02 | 1.51 | 1.76 | 0.26 | 0 | 1.88E−02 | −2.46 | 5 |
| hsa-asg-641 | 2.67 | 4.59 | 3.79 | 3.68 | 0.96 | 33 | 3.56E−02 | 1.54 | 3 |
| hsa-asg-6383 | 8.64 | 8.55 | 8.40 | 8.53 | 0.12 | 67 | 4.27E−02 | 0.31 | 1 |
| hsa-asg-6371 | 10.4 | 10.3 | 10.5 | 10.4 | 0.09 | 100 | 1.19E−02 | −0.40 | 1 |
| hsa-asg-6367 | 11.3 | 11.3 | 11.7 | 11.4 | 0.25 | 100 | 4.63E−02 | −0.40 | 1 |
| hsa-asg-6346 | 9.47 | 9.39 | 9.40 | 9.42 | 0.05 | 100 | 5.90E−03 | −0.30 | 1 |
| hsa-asg-6339 | 9.47 | 9.33 | 9.50 | 9.43 | 0.09 | 100 | 2.31E−02 | −0.42 | 1 |
| hsa-asg-6282 | 7.59 | 7.45 | 7.97 | 7.67 | 0.27 | 33 | 1.87E−02 | −0.54 | 1 |
| hsa-asg-6211 | 10.1 | 9.86 | 10.0 | 10.0 | 0.13 | 100 | 6.60E−03 | 0.32 | 1 |
| hsa-asg-6165 | 2.67 | 2.40 | 2.45 | 2.51 | 0.15 | 0 | 2.25E−03 | −1.64 | 3 |
| hsa-asg-6116 | 2.02 | 2.40 | 1.04 | 1.82 | 0.70 | 0 | 3.58E−02 | −2.17 | 5 |
| hsa-asg-6071 | 5.44 | 5.49 | 6.10 | 5.68 | 0.37 | 33 | 2.78E−03 | −1.04 | 2 |
| hsa-asg-6018 | 8.97 | 9.74 | 9.81 | 9.51 | 0.46 | 100 | 3.30E−02 | −0.71 | 2 |
| hsa-asg-584_st1 | 4.77 | 5.67 | 4.31 | 4.92 | 0.69 | 33 | 1.41E−02 | 2.38 | 5 |
| hsa-asg-5810 | 9.90 | 9.62 | 9.97 | 9.83 | 0.18 | 100 | 3.93E−02 | −0.32 | 1 |
| hsa-asg-5758 | 0.67 | 0.98 | 1.04 | 0.89 | 0.20 | 0 | 4.88E−02 | −1.76 | 3 |
| hsa-asg-5691 | 9.21 | 8.98 | 9.34 | 9.18 | 0.18 | 100 | 1.89E−02 | −0.53 | 1 |
| hsa-asg-551 | 7.17 | 7.46 | 7.66 | 7.43 | 0.25 | 100 | 2.59E−02 | −0.82 | 2 |
| hsa-asg-5326 | 6.24 | 5.98 | 6.79 | 6.34 | 0.41 | 67 | 1.31E−03 | −1.68 | 3 |
| hsa-asg-529 | 2.48 | 2.40 | 2.62 | 2.50 | 0.11 | 0 | 1.85E−02 | −1.36 | 3 |
| hsa-asg-5240 | 4.63 | 4.67 | 4.25 | 4.52 | 0.23 | 100 | 4.83E−04 | 1.01 | 2 |
| hsa-asg-5227 | 6.05 | 5.64 | 5.66 | 5.79 | 0.23 | 100 | 1.37E−02 | 1.44 | 3 |
| hsa-asg-5213 | 4.48 | 4.14 | 4.07 | 4.23 | 0.22 | 0 | 4.71E−02 | −1.61 | 3 |
| hsa-asg-5208 | 8.11 | 7.51 | 7.73 | 7.78 | 0.30 | 100 | 8.55E−03 | −0.71 | 2 |
| hsa-asg-5141 | 4.73 | 4.59 | 4.51 | 4.61 | 0.11 | 0 | 3.47E−02 | −0.92 | 2 |
| hsa-asg-5109 | 10.8 | 10.3 | 10.5 | 10.5 | 0.24 | 100 | 4.53E−02 | −0.49 | 1 |
| hsa-asg-4974 | 3.14 | 5.58 | 3.71 | 4.14 | 1.28 | 33 | 3.45E−02 | 1.88 | 4 |
| hsa-asg-497 | 3.87 | 3.79 | 3.23 | 3.63 | 0.35 | 0 | 2.61E−02 | −1.56 | 3 |
| hsa-asg-4844 | 10.4 | 10.2 | 10.2 | 10.3 | 0.09 | 100 | 1.84E−02 | 0.41 | 1 |
| hsa-asg-4840 | 6.09 | 4.71 | 6.68 | 5.82 | 1.01 | 67 | 3.67E−02 | 1.91 | 4 |
| hsa-asg-4834 | 8.86 | 9.00 | 8.73 | 8.86 | 0.14 | 100 | 3.05E−02 | −0.28 | 1 |
| hsa-asg-4828 | 9.58 | 9.29 | 9.00 | 9.29 | 0.29 | 100 | 1.20E−02 | −0.71 | 2 |
| hsa-asg-4808 | 7.08 | 7.07 | 7.13 | 7.09 | 0.03 | 33 | 3.70E−02 | −0.58 | 1 |
| hsa-asg-471 | 10.7 | 10.4 | 10.4 | 10.5 | 0.17 | 100 | 3.58E−02 | −0.27 | 1 |
| hsa-asg-4703 | 7.11 | 6.21 | 6.54 | 6.62 | 0.45 | 100 | 4.00E−02 | −0.97 | 2 |
| hsa-asg-4441 | 6.98 | 8.16 | 8.04 | 7.72 | 0.65 | 67 | 2.93E−02 | 1.03 | 2 |
| hsa-asg-4426 | 4.94 | 4.50 | 4.01 | 4.48 | 0.47 | 67 | 4.91E−02 | −1.00 | 2 |
| hsa-asg-4284 | 4.30 | 5.24 | 4.07 | 4.54 | 0.62 | 100 | 2.99E−02 | 1.26 | 2 |
| hsa-asg-4203 | 4.94 | 4.67 | 5.24 | 4.95 | 0.29 | 100 | 5.05E−03 | 0.93 | 2 |
| hsa-asg-4164 | 3.87 | 4.50 | 4.01 | 4.13 | 0.33 | 33 | 1.52E−02 | 0.73 | 2 |
| hsa-asg-4159 | 4.53 | 4.05 | 4.51 | 4.36 | 0.27 | 67 | 3.84E−02 | 0.47 | 1 |
| hsa-asg-4112 | 3.27 | 1.55 | 2.45 | 2.42 | 0.86 | 0 | 3.14E−02 | −2.02 | 4 |
| hsa-asg-4077 | 4.58 | 4.42 | 3.12 | 4.04 | 0.80 | 67 | 1.84E−02 | 1.89 | 4 |
| hsa-asg-4031 | 9.93 | 9.53 | 9.71 | 9.72 | 0.20 | 100 | 1.01E−02 | −0.53 | 1 |
| hsa-asg-3946 | 10.2 | 9.99 | 10.2 | 10.1 | 0.15 | 100 | 4.93E−02 | 0.64 | 2 |
| hsa-asg-3728 | 7.23 | 7.28 | 7.00 | 7.17 | 0.15 | 0 | 1.20E−02 | −0.53 | 1 |
| hsa-asg-3722 | 9.82 | 9.19 | 9.19 | 9.40 | 0.37 | 100 | 3.16E−02 | −0.62 | 2 |
| hsa-asg-3715 | 9.83 | 9.56 | 9.38 | 9.59 | 0.23 | 100 | 2.64E−02 | −0.58 | 1 |
| hsa-asg-3703 | 10.9 | 10.6 | 10.8 | 10.8 | 0.13 | 100 | 4.76E−02 | −0.36 | 1 |
| hsa-asg-3691 | 9.16 | 9.18 | 9.12 | 9.15 | 0.03 | 100 | 2.90E−02 | −0.44 | 1 |
| hsa-asg-3654 | 7.75 | 8.22 | 7.94 | 7.97 | 0.24 | 33 | 2.93E−02 | 0.89 | 2 |
| hsa-asg-3565 | 8.58 | 8.52 | 8.01 | 8.37 | 0.31 | 67 | 3.65E−02 | −0.56 | 1 |
| hsa-asg-3548 | 7.26 | 6.96 | 7.18 | 7.13 | 0.16 | 33 | 2.08E−02 | 0.93 | 2 |
| hsa-asg-3514 | 2.26 | 1.80 | 1.36 | 1.81 | 0.45 | 0 | 2.30E−02 | −1.91 | 4 |
| hsa-asg-3290 | 9.34 | 9.54 | 9.37 | 9.42 | 0.11 | 100 | 4.92E−02 | 0.25 | 1 |
| hsa-asg-3240 | 11.4 | 11.1 | 11.2 | 11.3 | 0.12 | 0 | 1.08E−02 | −0.40 | 1 |
| hsa-asg-3168 | 3.00 | 2.98 | 2.99 | 2.99 | 0.01 | 0 | 4.02E−02 | −1.38 | 3 |
| hsa-asg-3118 | 2.26 | 1.80 | 1.91 | 1.99 | 0.24 | 0 | 4.36E−02 | −1.24 | 2 |
| hsa-asg-3112 | 8.60 | 9.15 | 9.01 | 8.92 | 0.28 | 100 | 2.64E−02 | −0.59 | 2 |
| hsa-asg-3101 | 9.16 | 8.78 | 9.40 | 9.11 | 0.31 | 100 | 2.86E−02 | 0.48 | 1 |
| hsa-asg-3083 | 1.73 | 2.40 | 3.06 | 2.40 | 0.66 | 0 | 4.53E−02 | −1.48 | 3 |
| hsa-asg-3070 | 6.19 | 3.65 | 4.56 | 4.80 | 1.29 | 33 | 3.41E−02 | 2.06 | 4 |
| hsa-asg-305 | 1.41 | 1.55 | 1.91 | 1.63 | 0.26 | 0 | 3.49E−02 | −0.66 | 2 |
| hsa-asg-3046 | 10.0 | 9.83 | 9.73 | 9.88 | 0.17 | 100 | 4.27E−03 | 0.58 | 1 |
| hsa-asg-304 | 5.26 | 5.81 | 5.77 | 5.61 | 0.31 | 67 | 4.46E−02 | −0.87 | 2 |
| hsa-asg-3014 | 7.69 | 7.78 | 7.37 | 7.61 | 0.21 | 67 | 2.10E−03 | −0.67 | 2 |
| hsa-asg-2940 | 5.16 | 4.85 | 7.21 | 5.74 | 1.28 | 33 | 3.88E−02 | 1.79 | 3 |
| hsa-asg-2930 | 3.39 | 4.46 | 3.97 | 3.94 | 0.54 | 0 | 1.42E−02 | 1.32 | 2 |
| hsa-asg-2924 | 6.11 | 5.50 | 3.49 | 5.03 | 1.37 | 67 | 1.36E−02 | 3.55 | 12 |
| hsa-asg-2906 | 11.0 | 11.1 | 11.2 | 11.1 | 0.12 | 100 | 1.34E−02 | −0.26 | 1 |
| hsa-asg-2886 | 7.04 | 7.09 | 6.92 | 7.02 | 0.08 | 100 | 1.76E−03 | −1.02 | 2 |
| hsa-asg-2855 | 3.27 | 4.22 | 3.23 | 3.57 | 0.56 | 33 | 1.39E−02 | 1.25 | 2 |
| hsa-asg-278 | 9.39 | 9.53 | 9.65 | 9.52 | 0.13 | 100 | 7.82E−03 | 0.72 | 2 |
| hsa-asg-2563 | 7.48 | 8.04 | 8.08 | 7.86 | 0.33 | 67 | 1.95E−03 | −0.99 | 2 |
| hsa-asg-251 | 4.58 | 4.46 | 5.03 | 4.69 | 0.30 | 100 | 1.59E−02 | 0.60 | 2 |
| hsa-asg-247 | 7.98 | 7.65 | 7.97 | 7.87 | 0.19 | 100 | 1.17E−02 | −0.50 | 1 |
| hsa-asg-2459 | 3.87 | 2.98 | 3.94 | 3.60 | 0.54 | 0 | 1.51E−02 | 1.24 | 2 |
| hsa-asg-2449 | 1.05 | 2.31 | 1.04 | 1.47 | 0.73 | 0 | 7.32E−03 | −4.28 | 19 |
| hsa-asg-2437 | 8.74 | 8.63 | 8.24 | 8.54 | 0.27 | 100 | 4.40E−02 | 0.43 | 1 |
| hsa-asg-2433 | 3.00 | 3.09 | 3.75 | 3.28 | 0.41 | 0 | 2.12E−02 | −0.84 | 2 |
| hsa-asg-2401 | 9.42 | 10.1 | 10.0 | 9.90 | 0.42 | 100 | 4.98E−02 | 0.55 | 1 |
| hsa-asg-2371 | 3.00 | 4.32 | 4.85 | 4.06 | 0.95 | 67 | 9.41E−03 | 2.15 | 4 |
| hsa-asg-2232 | 2.67 | 2.57 | 2.54 | 2.59 | 0.07 | 0 | 9.25E−03 | 0.60 | 2 |
| hsa-asg-2076 | 2.02 | 2.02 | 1.91 | 1.98 | 0.06 | 0 | 4.73E−02 | −0.82 | 2 |
| hsa-asg-1978 | 5.16 | 4.17 | 5.18 | 4.84 | 0.58 | 67 | 1.71E−02 | 1.31 | 2 |
| hsa-asg-1974 | 4.90 | 3.72 | 3.71 | 4.11 | 0.68 | 33 | 1.04E−02 | 1.34 | 3 |
| hsa-asg-1937 | 6.67 | 3.48 | 5.21 | 5.12 | 1.60 | 67 | 1.45E−02 | 3.38 | 10 |
| hsa-asg-1919 | 8.42 | 8.80 | 8.16 | 8.46 | 0.32 | 100 | 1.33E−02 | −0.81 | 2 |
| hsa-asg-1886 | 11.4 | 11.7 | 11.4 | 11.5 | 0.17 | 100 | 2.02E−02 | 0.51 | 1 |
| hsa-asg-1832 | 7.45 | 7.22 | 7.63 | 7.43 | 0.20 | 0 | 1.03E−02 | −0.74 | 2 |
| hsa-asg-1807 | 4.94 | 2.22 | 5.11 | 4.09 | 1.62 | 67 | 2.53E−02 | 2.78 | 7 |
| hsa-asg-1797 | 10.4 | 9.99 | 10.1 | 10.1 | 0.22 | 100 | 2.06E−02 | 0.40 | 1 |
| hsa-asg-1726 | 10.4 | 10.6 | 10.5 | 10.5 | 0.14 | 100 | 1.78E−03 | −0.52 | 1 |
| hsa-asg-1658 | 4.42 | 4.53 | 5.06 | 4.67 | 0.34 | 0 | 1.70E−02 | −0.84 | 2 |
| hsa-asg-1557 | 2.84 | 2.71 | 2.85 | 2.80 | 0.08 | 0 | 2.86E−02 | −0.92 | 2 |
| hsa-asg-1532 | 7.18 | 7.07 | 6.34 | 6.86 | 0.46 | 0 | 1.28E−02 | −1.24 | 2 |
| hsa-asg-145 | 10.4 | 10.8 | 10.6 | 10.6 | 0.22 | 100 | 7.73E−03 | 0.65 | 2 |
| hsa-asg-1448 | 7.01 | 6.15 | 6.25 | 6.47 | 0.47 | 0 | 1.56E−02 | −1.21 | 2 |
| hsa-asg-14237 | 9.22 | 9.99 | 10.9 | 10.0 | 0.88 | 100 | 4.80E−02 | 1.20 | 2 |
| hsa-asg-142 | 8.94 | 8.97 | 8.90 | 8.94 | 0.04 | 100 | 4.00E−02 | −0.41 | 1 |
| hsa-asg-14197 | 13.7 | 14.2 | 13.7 | 13.8 | 0.32 | 100 | 4.76E−02 | 0.46 | 1 |
| hsa-asg-14189 | 14.8 | 14.7 | 14.7 | 14.7 | 0.03 | 100 | 1.70E−02 | 0.23 | 1 |
| hsa-asg-14135 | 4.30 | 3.79 | 4.46 | 4.19 | 0.35 | 33 | 3.81E−02 | 0.67 | 2 |
| hsa-asg-14053 | 7.29 | 7.54 | 6.95 | 7.26 | 0.30 | 33 | 7.49E−04 | 1.17 | 2 |
| hsa-asg-14029 | 5.16 | 5.85 | 5.83 | 5.61 | 0.39 | 33 | 3.92E−02 | −0.85 | 2 |
| hsa-asg-14026 | 4.03 | 5.24 | 5.30 | 4.85 | 0.72 | 67 | 1.19E−02 | 1.75 | 3 |
| hsa-asg-1398 | 5.20 | 5.07 | 5.67 | 5.31 | 0.32 | 100 | 4.77E−02 | 0.73 | 2 |
| hsa-asg-13973 | 7.05 | 7.43 | 7.32 | 7.27 | 0.19 | 33 | 3.77E−02 | −0.79 | 2 |
| hsa-asg-13963 | 7.81 | 6.94 | 7.91 | 7.55 | 0.53 | 0 | 3.34E−02 | −0.93 | 2 |
| hsa-asg-13895 | 4.68 | 4.81 | 4.46 | 4.65 | 0.18 | 100 | 5.76E−03 | 0.48 | 1 |
| hsa-asg-13808 | 2.02 | 3.79 | 2.70 | 2.84 | 0.90 | 0 | 4.11E−02 | −1.62 | 3 |
| hsa-asg-13736 | 8.11 | 8.18 | 8.39 | 8.22 | 0.15 | 67 | 5.12E−03 | −0.50 | 1 |
| hsa-asg-13705 | 6.07 | 4.42 | 5.83 | 5.44 | 0.89 | 100 | 3.46E−03 | 2.59 | 6 |
| hsa-asg-1369 | 2.48 | 4.92 | 4.31 | 3.90 | 1.27 | 33 | 3.92E−02 | 1.87 | 4 |
| hsa-asg-13606 | 11.6 | 11.3 | 11.5 | 11.4 | 0.14 | 100 | 2.77E−02 | −0.41 | 1 |
| hsa-asg-13604 | 10.3 | 10.4 | 10.6 | 10.4 | 0.18 | 100 | 1.98E−03 | −0.63 | 2 |
| hsa-asg-1360 | 8.46 | 8.87 | 8.21 | 8.52 | 0.34 | 67 | 3.84E−02 | −0.45 | 1 |
| hsa-asg-13501 | 5.94 | 5.30 | 4.31 | 5.18 | 0.82 | 33 | 4.04E−02 | −1.43 | 3 |
| hsa-asg-13334 | 5.32 | 5.84 | 5.88 | 5.68 | 0.31 | 67 | 3.41E−02 | 1.54 | 3 |
| hsa-asg-13306 | 12.6 | 13.0 | 12.9 | 12.8 | 0.21 | 100 | 2.46E−02 | 0.50 | 1 |
| hsa-asg-13294 | 4.73 | 4.78 | 4.89 | 4.80 | 0.08 | 0 | 1.24E−02 | 0.38 | 1 |
| hsa-asg-13197 | 5.29 | 4.95 | 4.51 | 4.92 | 0.39 | 100 | 1.05E−02 | 2.24 | 5 |
| hsa-asg-13083 | 8.38 | 8.35 | 8.66 | 8.46 | 0.17 | 67 | 8.70E−03 | −0.86 | 2 |
| hsa-asg-12922 | 5.23 | 6.30 | 5.24 | 5.59 | 0.62 | 33 | 1.93E−02 | −1.38 | 3 |
| hsa-asg-1270 | 2.26 | 2.40 | 2.70 | 2.46 | 0.22 | 0 | 1.85E−02 | −1.66 | 3 |
| hsa-asg-12687 | 8.20 | 8.53 | 8.89 | 8.54 | 0.34 | 67 | 3.58E−02 | −0.57 | 1 |
| hsa-asg-12602 | 3.87 | 4.92 | 3.79 | 4.19 | 0.63 | 33 | 5.43E−04 | 2.54 | 6 |
| hsa-asg-12556 | 10.2 | 9.80 | 10.1 | 10.0 | 0.22 | 100 | 3.37E−02 | −0.55 | 1 |
| hsa-asg-12549 | 2.02 | 1.80 | 1.91 | 1.91 | 0.11 | 0 | 4.72E−02 | −1.66 | 3 |
| hsa-asg-12531 | 3.79 | 3.35 | 2.35 | 3.16 | 0.74 | 0 | 3.39E−02 | −2.08 | 4 |
| hsa-asg-12463 | 1.41 | 1.55 | 1.65 | 1.54 | 0.12 | 0 | 7.84E−03 | −0.38 | 1 |
| hsa-asg-12461 | 4.42 | 2.57 | 4.46 | 3.82 | 1.08 | 33 | 2.20E−02 | 2.09 | 4 |
| hsa-asg-12460 | 7.94 | 7.62 | 7.79 | 7.78 | 0.16 | 100 | 4.19E−02 | −0.71 | 2 |
| hsa-asg-12441 | 10.6 | 10.6 | 10.6 | 10.6 | 0.03 | 100 | 2.93E−02 | −0.23 | 1 |
| hsa-asg-12421 | 9.40 | 8.62 | 9.45 | 9.16 | 0.46 | 100 | 4.86E−02 | −0.70 | 2 |
| hsa-asg-12356 | 8.60 | 8.34 | 8.19 | 8.38 | 0.21 | 100 | 3.45E−03 | −0.73 | 2 |
| hsa-asg-12344 | 9.13 | 8.77 | 8.66 | 8.85 | 0.24 | 100 | 8.73E−03 | −0.89 | 2 |
| hsa-asg-12343 | 7.49 | 7.26 | 7.76 | 7.50 | 0.25 | 100 | 4.82E−02 | 0.76 | 2 |
| hsa-asg-12320 | 3.70 | 3.72 | 5.53 | 4.32 | 1.05 | 33 | 4.08E−02 | 1.84 | 4 |
| hsa-asg-12286 | 8.54 | 8.07 | 7.95 | 8.19 | 0.31 | 33 | 1.88E−02 | −0.83 | 2 |
| hsa-asg-12150 | 10.2 | 10.0 | 10.6 | 10.3 | 0.31 | 100 | 3.55E−02 | −0.54 | 1 |
| hsa-asg-12045 | 5.85 | 5.43 | 6.27 | 5.85 | 0.42 | 67 | 1.59E−03 | 2.36 | 5 |
| hsa-asg-12005 | 10.3 | 9.73 | 10.3 | 10.1 | 0.35 | 100 | 4.35E−02 | 0.62 | 2 |
| hsa-asg-11973 | 8.46 | 8.11 | 8.21 | 8.26 | 0.18 | 67 | 1.60E−02 | −0.66 | 2 |
| hsa-asg-11969 | 11.0 | 9.95 | 9.11 | 10.0 | 0.97 | 100 | 4.27E−02 | 1.31 | 2 |
| hsa-asg-11956 | 7.68 | 8.01 | 7.00 | 7.56 | 0.51 | 33 | 2.62E−02 | −0.86 | 2 |
| hsa-asg-11945 | 9.06 | 9.30 | 9.66 | 9.34 | 0.30 | 100 | 4.68E−02 | −0.47 | 1 |
| hsa-asg-11931 | 1.73 | 2.64 | 1.91 | 2.10 | 0.48 | 0 | 2.14E−02 | −1.63 | 3 |
| hsa-asg-11930 | 4.86 | 4.27 | 4.34 | 4.49 | 0.32 | 33 | 4.82E−02 | −0.80 | 2 |
| hsa-asg-11898 | 6.65 | 6.70 | 6.68 | 6.68 | 0.03 | 100 | 5.38E−04 | −1.12 | 2 |
| hsa-asg-1189 | 7.52 | 7.22 | 7.14 | 7.29 | 0.20 | 33 | 4.51E−02 | −0.97 | 2 |
| hsa-asg-11877 | 5.41 | 5.94 | 5.08 | 5.48 | 0.44 | 0 | 3.86E−03 | −1.30 | 2 |
| hsa-asg-11797 | 7.80 | 7.85 | 7.44 | 7.70 | 0.23 | 33 | 4.96E−02 | −0.43 | 1 |
| hsa-asg-1174 | 9.53 | 9.21 | 9.07 | 9.27 | 0.24 | 100 | 2.22E−02 | −0.45 | 1 |
| hsa-asg-11643 | 3.60 | 4.42 | 3.71 | 3.91 | 0.44 | 0 | 1.46E−02 | 0.93 | 2 |
| hsa-asg-11623 | 11.0 | 11.0 | 10.8 | 11.0 | 0.12 | 0 | 1.19E−02 | −0.44 | 1 |
| hsa-asg-11617 | 9.79 | 9.71 | 9.99 | 9.83 | 0.14 | 100 | 1.96E−02 | −0.53 | 1 |
| hsa-asg-11612 | 8.58 | 9.37 | 8.89 | 8.94 | 0.40 | 67 | 3.25E−03 | 1.04 | 2 |
| hsa-asg-11606 | 12.0 | 12.0 | 11.8 | 11.9 | 0.13 | 100 | 3.67E−03 | 0.65 | 2 |
| hsa-asg-11580 | 3.00 | 4.11 | 3.12 | 3.41 | 0.61 | 33 | 2.69E−02 | 1.36 | 3 |
| hsa-asg-11555 | 3.60 | 3.79 | 3.63 | 3.67 | 0.10 | 0 | 2.13E−02 | −0.85 | 2 |
| hsa-asg-11521 | 8.29 | 8.72 | 8.70 | 8.57 | 0.24 | 67 | 4.85E−02 | −0.68 | 2 |
| hsa-asg-11513 | 9.15 | 8.81 | 9.15 | 9.03 | 0.20 | 100 | 3.88E−02 | −0.36 | 1 |
| hsa-asg-11193 | 11.7 | 11.7 | 11.9 | 11.8 | 0.08 | 67 | 3.30E−02 | −0.31 | 1 |
| hsa-asg-11128 | 4.24 | 4.63 | 4.65 | 4.50 | 0.23 | 67 | 4.37E−02 | 0.50 | 1 |
| hsa-asg-11112 | 11.2 | 10.9 | 11.0 | 11.0 | 0.16 | 100 | 3.01E−02 | −0.33 | 1 |
| hsa-asg-11002 | 1.73 | 0.20 | 1.65 | 1.20 | 0.86 | 0 | 1.34E−02 | −2.03 | 4 |
| hsa-asg-10958 | 2.67 | 3.65 | 3.12 | 3.15 | 0.49 | 0 | 4.08E−02 | 0.96 | 2 |
| hsa-asg-10901 | 5.88 | 6.55 | 5.06 | 5.83 | 0.75 | 67 | 2.29E−02 | −1.22 | 2 |
| hsa-asg-10810 | 6.61 | 5.01 | 4.36 | 5.33 | 1.16 | 100 | 2.40E−02 | 1.84 | 4 |
| hsa-asg-1072 | 1.41 | 2.02 | 1.36 | 1.60 | 0.37 | 0 | 4.29E−02 | −1.39 | 3 |
| hsa-asg-10639 | 11.6 | 11.3 | 11.2 | 11.3 | 0.22 | 100 | 3.73E−02 | −0.37 | 1 |
| hsa-asg-10517 | 3.14 | 3.90 | 3.94 | 3.66 | 0.45 | 0 | 8.06E−03 | 1.65 | 3 |
| hsa-asg-105 | 6.93 | 4.44 | 5.09 | 5.49 | 1.29 | 33 | 3.44E−02 | 2.21 | 5 |
| hsa-asg-10487 | 2.02 | 1.41 | 1.04 | 1.49 | 0.49 | 0 | 1.24E−02 | −3.09 | 8 |
| hsa-asg-10486 | 2.26 | 2.02 | 1.91 | 2.07 | 0.18 | 0 | 1.73E−02 | −0.84 | 2 |
| hsa-asg-10464 | 2.26 | 2.02 | 1.91 | 2.07 | 0.18 | 0 | 4.22E−02 | −2.04 | 4 |
| hsa-asg-10392 | 9.35 | 9.48 | 9.38 | 9.40 | 0.07 | 100 | 1.12E−02 | −0.71 | 2 |
| hsa-asg-10280 | 5.70 | 5.66 | 6.21 | 5.86 | 0.31 | 100 | 1.68E−03 | 2.74 | 7 |
| hsa-asg-10278 | 3.14 | 2.64 | 3.12 | 2.97 | 0.28 | 0 | 2.36E−02 | 0.60 | 2 |
| hsa-asg-1026 | 4.63 | 3.72 | 5.17 | 4.51 | 0.73 | 33 | 2.55E−02 | −1.15 | 2 |
| hsa-asg-10247 | 3.95 | 4.55 | 4.01 | 4.17 | 0.33 | 33 | 1.78E−04 | 2.02 | 4 |
| hsa-asg-1020 | 7.69 | 8.20 | 8.14 | 8.01 | 0.28 | 67 | 9.20E−03 | −0.65 | 2 |
| hsa-asg-1018 | 3.70 | 4.65 | 5.71 | 4.68 | 1.00 | 0 | 1.40E−02 | −1.92 | 4 |
| hsa-asg-10131 | 5.98 | 4.71 | 4.65 | 5.11 | 0.75 | 100 | 2.42E−02 | 1.52 | 3 |
| hsa-miR-224 | 6.68 | 9.06 | 10.8 | 8.87 | 2.09 | 100 | 2.05E−02 | 3.57 | 12 |
| hsa-miR-99b | 9.40 | 10.2 | 9.37 | 9.66 | 0.47 | 0 | 6.19E−03 | 1.21 | 2 |

LNpos2/LNneg2, LNpos3/LNneg3, and LNpos4/LNneg4 represent matched samples obtained from three different patients.
SD, standard deviation;
%, percentage of samples expressing miRNA above background levels;
Log2Diff, difference in VSN-transformed expression between LNpos and LNneg samples.

### Example 41

### miRNAs Differentially Expressed Between Normal Breast Tissue and Cancer-negative Axillary Lymph Nodes from Breast Cancer Patients

[0359] To identify the miRNAs differentially expressed between normal breast tissue samples and cancer negative axillary lymph nodes, the inventors compared the average miRNA expression levels in three normal human breast tissue samples (described above in Example 19) with those in the four cancer-negative axillary lymph nodes from ductal breast cancer patients (described above in Example 40). RNA labeling and microarray expression analysis was performed as described above in Example 40. A total of 620 miRNAs (168 verified and 452 predicted) were significantly differentially expressed between normal breast (NBr) and negative lymph node (LNneg) samples (Log2Diff(NBr vs LNneg)≧1; t-test (NBr vs LNneg)<0.05) (Table 40). Among the verified miRNAs, only three (hsa-miR-155, -150, and -155) had average expression levels that were lower (3-6 fold) in NBr compared to LNneg. One (hsa-miR-205) had an average expression level at least 1,000 fold higher in NBr compared to negative LNneg; seven (hsa-miR-200b, -368, -200a, -141, -199b, -411, and -335) had average expression levels 100- to 500-fold higher in NBr; eleven (hsa-miR-1, -224, -218, -200c, -551b, -19a, -140, -495, -182, -424, and -451) had average expression levels 50- to 95-fold higher in NBr samples; nineteen (hsa-miR-452, -486, -429, -189, -96, -421-3p, -133a, -30a-3p, -487b, -452, -154, -375, -127, -22, -148b, -379, -19b, -489, and -152) had average expression levels 20- to 49-fold higher in NBr; and 98 had expression levels 5- to 19-fold higher in NBr samples compared to LNneg (Table 40). Among the predicted miRNAs, three (hsa-asg-5021_st1, -13254_st1, and hsa-miR154_st1) had average expression levels more than 50-fold lower in LNneg compared to NBr samples, and 24 had average expression levels 10- to 50-fold lower in LNneg compared to NBr samples (Table 40).

TABLE 40
miRNAs differentially expressed between three normal breast (NBr) tissue samples and four
cancer-negative lymph nodes (LNneg1-4) obtained from breast cancer patients.

| Micro | Probe | NBr | | | | | | LNneg | |
|---|---|---|---|---|---|---|---|---|---|
| RNA | ID | 1 | 2 | 3 | Mean | SD | % | 1 | 2 |
| hsa-let-7a | hsa-let-7a_st2 | 14.97 | 14.67 | 14.62 | 14.75 | 0.19 | 100 | 12.99 | 12.58 |
| hsa-let-7b | hsa-let-7b_st2 | 13.68 | 13.46 | 13.50 | 13.55 | 0.11 | 100 | 11.22 | 10.72 |
| hsa-let-7c | hsa-let-7c_st2 | 14.54 | 14.25 | 14.32 | 14.37 | 0.15 | 100 | 12.11 | 11.99 |
| hsa-let-7d | hsa-let-7d_st2 | 14.54 | 14.24 | 14.34 | 14.37 | 0.15 | 100 | 12.27 | 12.03 |
| hsa-let-7e | hsa-let-7e_st1 | 12.44 | 12.34 | 12.56 | 12.45 | 0.11 | 100 | 10.22 | 9.61 |
| hsa-let-7f | hsa-let-7f_st1 | 14.57 | 14.27 | 14.37 | 14.40 | 0.15 | 100 | 12.02 | 11.76 |
| hsa-let-7g | hsa-let-7g_st2 | 14.00 | 13.58 | 13.80 | 13.79 | 0.21 | 100 | 12.20 | 11.41 |
| hsa-let-7i | hsa-let-7i_st1 | 13.55 | 13.10 | 13.36 | 13.34 | 0.22 | 100 | 11.08 | 10.41 |
| hsa-miR-1 | hsa-miR-1_st1 | 6.42 | 12.28 | 8.34 | 9.02 | 2.99 | 100 | 2.08 | 1.35 |
| hsa-miR-100 | hsa-miR-100_st2 | 13.26 | 12.89 | 12.96 | 13.04 | 0.20 | 100 | 9.41 | 9.53 |
| hsa-miR-101 | hsa-miR-101_st1 | 8.96 | 8.67 | 9.64 | 9.09 | 0.50 | 100 | 5.69 | 6.20 |
| hsa-miR-103 | hsa-miR-103_st1 | 13.44 | 13.23 | 13.36 | 13.34 | 0.11 | 100 | 10.78 | 10.79 |
| hsa-miR-106a | hsa-miR-106a_st1 | 13.04 | 12.32 | 12.66 | 12.67 | 0.36 | 100 | 9.68 | 9.37 |
| hsa-miR-106b | hsa-miR-106b_st2 | 11.61 | 10.58 | 11.01 | 11.07 | 0.52 | 100 | 7.39 | 6.69 |
| hsa-miR-107 | hsa-miR-107_st2 | 13.24 | 13.07 | 13.22 | 13.17 | 0.09 | 100 | 10.29 | 10.58 |
| hsa-miR-10a | hsa-miR-10a_st1 | 11.74 | 11.83 | 11.81 | 11.79 | 0.05 | 100 | 8.20 | 8.14 |
| hsa-miR-10b | hsa-miR-10b_st2 | 12.96 | 12.83 | 12.84 | 12.88 | 0.07 | 100 | 9.46 | 10.02 |
| hsa-miR-125a | hsa-miR-125a_st2 | 12.40 | 12.10 | 12.45 | 12.32 | 0.19 | 100 | 9.87 | 9.93 |
| hsa-miR-125b | hsa-miR-125b_st1 | 14.60 | 14.16 | 14.20 | 14.32 | 0.24 | 100 | 10.69 | 11.56 |
| hsa-miR-126 | hsa-miR-126_st2 | 14.61 | 14.60 | 14.47 | 14.56 | 0.08 | 100 | 12.34 | 11.78 |
| hsa-miR-126* | hsa-miR-126_st2 | 4.99 | 5.51 | 6.37 | 5.62 | 0.70 | 100 | 2.51 | 2.76 |
| hsa-miR-127 | hsa-miR-127_st1 | 10.43 | 8.06 | 9.23 | 9.24 | 1.18 | 100 | 4.68 | 4.27 |
| hsa-miR-128a | hsa-miR-128a_st2 | 9.63 | 9.63 | 9.15 | 9.47 | 0.28 | 100 | 5.28 | 5.95 |
| hsa-miR-128b | hsa-miR-128b_st1 | 9.71 | 9.83 | 9.81 | 9.78 | 0.07 | 100 | 5.99 | 7.01 |
| hsa-miR-130a | hsa-miR-130a_st1 | 11.78 | 10.85 | 11.16 | 11.26 | 0.47 | 100 | 8.01 | 8.35 |
| hsa-miR-130b | hsa-miR-130b_st1 | 8.20 | 7.48 | 7.98 | 7.89 | 0.37 | 100 | 5.88 | 6.53 |
| hsa-miR-132 | hsa-miR-132_st1 | 10.13 | 8.20 | 8.90 | 9.07 | 0.98 | 33.33 | 2.20 | 6.16 |
| hsa-miR-133a | hsa-miR-133a_st1 | 5.22 | 11.48 | 4.77 | 7.16 | 3.75 | 33.33 | 2.69 | 1.48 |
| hsa-miR-134 | hsa-miR-134_st2 | 8.84 | 8.26 | 8.06 | 8.38 | 0.41 | 100 | 7.40 | 7.97 |
| hsa-miR-137 | hsa-miR-137_st1 | 2.38 | 2.49 | 2.12 | 2.33 | 0.19 | 0 | 2.08 | 2.08 |
| hsa-miR-139 | hsa-miR-139_st2 | 10.50 | 10.45 | 10.60 | 10.52 | 0.08 | 100 | 7.60 | 4.95 |
| hsa-miR-140 | hsa-miR-140_st2 | 7.33 | 7.49 | 8.28 | 7.70 | 0.51 | 100 | 2.69 | 1.35 |
| hsa-miR-141 | hsa-miR-141_st1 | 11.26 | 7.11 | 9.31 | 9.23 | 2.08 | 100 | 1.83 | 1.74 |
| hsa-miR-143 | hsa-miR-143_st2 | 14.18 | 14.09 | 14.07 | 14.11 | 0.06 | 100 | 9.93 | 9.84 |
| hsa-miR-145 | hsa-miR-145_st1 | 14.67 | 14.51 | 14.48 | 14.55 | 0.10 | 100 | 12.23 | 12.28 |
| hsa-miR-146b | hsa-miR-146b_st1 | 12.27 | 10.47 | 11.75 | 11.49 | 0.93 | 100 | 9.47 | 9.10 |
| hsa-miR-148a | hsa-miR-148a_st1 | 12.93 | 11.80 | 12.38 | 12.37 | 0.57 | 100 | 8.68 | 7.61 |
| hsa-miR-148b | hsa-miR-148b_st2 | 9.78 | 9.70 | 9.82 | 9.76 | 0.06 | 100 | 4.91 | 4.53 |
| hsa-miR-150 | hsa-miR-150_st1 | 12.01 | 12.18 | 12.16 | 12.12 | 0.10 | 100 | 13.80 | 13.42 |
| hsa-miR-151 | hsa-miR-151_st2 | 10.03 | 9.45 | 9.63 | 9.70 | 0.30 | 100 | 6.77 | 6.09 |
| hsa-miR-152 | hsa-miR-152_st1 | 11.81 | 11.37 | 11.73 | 11.64 | 0.24 | 100 | 7.06 | 6.96 |
| hsa-miR-154 | hsa-miR-154_st2 | 8.25 | 5.85 | 6.72 | 6.94 | 1.22 | 66.66 | 2.99 | 1.74 |
| hsa-miR-154* | hsa-miR-154_st2 | 5.42 | 5.75 | 6.08 | 5.75 | 0.33 | 100 | 3.25 | 2.08 |
| hsa-miR-155 | hsa-miR-155_st1 | 9.03 | 9.17 | 9.32 | 9.17 | 0.15 | 100 | 10.79 | 10.00 |
| hsa-miR-15a | hsa-miR-15a_st1 | 12.12 | 11.79 | 12.32 | 12.08 | 0.27 | 100 | 8.81 | 8.10 |
| hsa-miR-15b | hsa-miR-15b_st1 | 11.46 | 11.44 | 11.94 | 11.61 | 0.28 | 100 | 9.15 | 8.36 |
| hsa-miR-16 | hsa-miR-16_st2 | 14.41 | 14.45 | 14.37 | 14.41 | 0.04 | 100 | 12.13 | 12.04 |
| hsa-miR-17- | hsa-miR-17- | 8.98 | 6.99 | 7.55 | 7.84 | 1.03 | 100 | 6.67 | 4.67 |
| 3p | 3p_st1 | | | | | | | | |
| hsa-miR-17- | hsa-miR-17- | 12.85 | 11.83 | 12.43 | 12.37 | 0.51 | 100 | 9.52 | 9.17 |
| 5p | 5p_st1 | | | | | | | | |
| hsa-miR-181a | hsa-miR-181a_st1 | 11.83 | 10.83 | 10.96 | 11.21 | 0.54 | 100 | 9.13 | 9.33 |
| hsa-miR- | hsa-miR-213_st1 | 7.04 | 7.04 | 7.42 | 7.16 | 0.22 | 100 | 2.51 | 5.30 |
| 181a* | | | | | | | | | |
| hsa-miR-181b | hsa-miR-181b_st2 | 9.19 | 8.25 | 8.67 | 8.70 | 0.47 | 100 | 7.45 | 7.38 |
| hsa-miR-181d | hsa-miR-181d_st1 | 7.21 | 6.91 | 7.77 | 7.29 | 0.44 | 100 | 4.18 | 4.73 |
| hsa-miR-182 | hsa-miR-182_st1 | 9.70 | 9.09 | 9.63 | 9.47 | 0.33 | 100 | 4.12 | 3.75 |
| hsa-miR-185 | hsa-miR-185_st2 | 9.58 | 9.81 | 10.80 | 10.06 | 0.65 | 100 | 5.06 | 6.84 |
| hsa-miR-186 | hsa-miR-186_st1 | 6.02 | 5.81 | 7.06 | 6.30 | 0.67 | 100 | 3.57 | 1.86 |
| hsa-miR-189 | hsa-miR-189_st1 | 6.18 | 7.04 | 5.84 | 6.35 | 0.62 | 66.66 | 1.54 | 0.58 |
| hsa-miR-18a | hsa-miR-18a_st1 | 7.31 | 5.05 | 6.94 | 6.43 | 1.21 | 100 | 2.51 | 2.08 |
| hsa-miR-18b | hsa-miR-18b_st1 | 6.63 | 5.09 | 6.50 | 6.07 | 0.85 | 100 | 3.36 | 1.62 |
| hsa-miR-191 | hsa-miR-191_st2 | 13.23 | 12.86 | 13.06 | 13.05 | 0.19 | 100 | 11.18 | 11.02 |
| hsa-miR-192 | hsa-miR-192_st2 | 7.96 | 7.76 | 8.56 | 8.09 | 0.42 | 100 | 6.92 | 5.76 |
| hsa-miR-193a | hsa-miR-193a_st1 | 9.64 | 9.17 | 9.17 | 9.33 | 0.27 | 100 | 6.03 | 6.23 |
| hsa-miR-193b | hsa-miR-193b_st1 | 11.05 | 12.17 | 12.16 | 11.79 | 0.65 | 100 | 8.14 | 7.05 |
| hsa-miR-194 | hsa-miR-194_st2 | 8.68 | 7.84 | 8.82 | 8.45 | 0.53 | 100 | 5.69 | 5.23 |
| hsa-miR-195 | hsa-miR-195_st2 | 14.32 | 13.82 | 13.93 | 14.03 | 0.26 | 100 | 10.38 | 9.75 |
| hsa-miR-196b | hsa-miR-196b_st2 | 7.13 | 3.76 | 7.05 | 5.98 | 1.92 | 66.66 | 3.91 | 2.45 |
| hsa-miR-199a | hsa-miR-199a_st2 | 12.99 | 12.28 | 12.43 | 12.57 | 0.37 | 100 | 9.70 | 9.17 |
| hsa-miR- | hsa-miR-199a-_st1 | 14.39 | 13.95 | 13.99 | 14.11 | 0.24 | 100 | 10.66 | 9.33 |
| 199a* | | | | | | | | | |
| hsa-miR-199b | hsa-miR-199b_st2 | 12.23 | 11.44 | 11.87 | 11.85 | 0.40 | 100 | 3.25 | 5.52 |
| hsa-miR-19a | hsa-miR-19a_st1 | 9.37 | 8.45 | 9.10 | 8.97 | 0.47 | 100 | 3.57 | 2.08 |
| hsa-miR-19b | hsa-miR-19b_st2 | 12.95 | 12.11 | 12.57 | 12.54 | 0.42 | 100 | 8.00 | 7.31 |
| hsa-miR-200a | hsa-miR-200a_st2 | 11.71 | 8.54 | 9.48 | 9.91 | 1.63 | 100 | 2.08 | 2.45 |
| hsa-miR-200b | hsa-miR-200b_st1 | 12.95 | 10.21 | 11.57 | 11.57 | 1.37 | 100 | 2.51 | 1.86 |
| hsa-miR-200c | hsa-miR-200c_st1 | 13.23 | 10.88 | 11.90 | 12.00 | 1.18 | 100 | 5.06 | 5.86 |
| hsa-miR-203 | hsa-miR-203_st2 | 7.43 | 6.28 | 7.83 | 7.18 | 0.81 | 100 | 3.36 | 3.34 |
| hsa-miR-205 | hsa-miR-205_st1 | 14.02 | 13.00 | 13.39 | 13.47 | 0.52 | 100 | 0.86 | 2.69 |
| hsa-miR-20a | hsa-miR-20a_st2 | 12.66 | 11.83 | 12.24 | 12.24 | 0.41 | 100 | 9.19 | 8.56 |
| hsa-miR-20b | hsa-miR-20b_st2 | 10.76 | 9.88 | 10.77 | 10.47 | 0.51 | 100 | 7.39 | 6.98 |
| hsa-miR-21 | hsa-miR-21_st2 | 13.82 | 13.64 | 13.88 | 13.78 | 0.12 | 100 | 10.80 | 9.74 |
| hsa-miR-214 | hsa-miR-214_st1 | 10.39 | 10.05 | 9.96 | 10.14 | 0.23 | 100 | 8.49 | 9.41 |
| hsa-miR-215 | hsa-miR-215_st1 | 5.58 | 6.18 | 7.31 | 6.36 | 0.88 | 100 | 2.51 | 2.28 |
| hsa-miR-218 | hsa-miR-218_st2 | 9.00 | 8.32 | 8.64 | 8.66 | 0.34 | 100 | 4.05 | 1.35 |
| hsa-miR-22 | hsa-miR-22_st1 | 13.32 | 13.56 | 13.74 | 13.54 | 0.21 | 100 | 8.89 | 9.06 |
| hsa-miR-221 | hsa-miR-221_st1 | 12.86 | 12.24 | 12.48 | 12.53 | 0.31 | 100 | 10.19 | 9.55 |
| hsa-miR-222 | hsa-miR-222_st2 | 12.51 | 11.97 | 11.95 | 12.14 | 0.31 | 100 | 10.65 | 9.93 |
| hsa-miR-223 | hsa-miR-223_st1 | 11.40 | 11.75 | 12.48 | 11.88 | 0.55 | 100 | 9.37 | 9.34 |
| hsa-miR-224 | hsa-miR-224_st2 | 11.33 | 12.08 | 11.84 | 11.75 | 0.38 | 100 | 5.45 | 5.33 |
| hsa-miR-23a | hsa-miR-23a_st2 | 14.58 | 14.50 | 14.51 | 14.53 | 0.04 | 100 | 11.86 | 11.73 |
| hsa-miR-23b | hsa-miR-23b_st1 | 14.29 | 14.24 | 14.27 | 14.26 | 0.03 | 100 | 11.64 | 11.44 |
| hsa-miR-24 | hsa-miR-24_st1 | 13.65 | 13.60 | 13.61 | 13.62 | 0.03 | 100 | 10.23 | 10.14 |
| hsa-miR-25 | hsa-miR-25_st2 | 12.32 | 12.28 | 12.40 | 12.33 | 0.06 | 100 | 9.69 | 9.79 |
| hsa-miR-26a | hsa-miR-26a_st2 | 14.82 | 14.64 | 14.49 | 14.65 | 0.17 | 100 | 13.06 | 12.62 |
| hsa-miR-26b | hsa-miR-26b_st1 | 12.88 | 12.61 | 13.18 | 12.89 | 0.29 | 100 | 10.06 | 9.20 |
| hsa-miR-27a | hsa-miR-27a_st2 | 12.38 | 12.89 | 13.00 | 12.76 | 0.33 | 100 | 8.41 | 8.64 |
| hsa-miR-27b | hsa-miR-27b_st1 | 12.65 | 12.83 | 12.76 | 12.75 | 0.09 | 100 | 8.08 | 8.11 |
| hsa-miR-28 | hsa-miR-28_st1 | 11.32 | 10.88 | 11.12 | 11.11 | 0.22 | 100 | 8.45 | 7.82 |
| hsa-miR-299- | hsa-miR-299- | 5.97 | 5.83 | 6.88 | 6.23 | 0.57 | 100 | 2.51 | 2.08 |
| 5p | 5p_st2 | | | | | | | | |
| hsa-miR-29a | hsa-miR-29a_st2 | 13.48 | 13.26 | 13.38 | 13.37 | 0.11 | 100 | 11.97 | 11.45 |
| hsa-miR-29b | hsa-miR-29b_st1 | 11.69 | 11.17 | 11.96 | 11.61 | 0.40 | 100 | 9.79 | 8.32 |
| hsa-miR-29c | hsa-miR-29c_st2 | 10.51 | 10.54 | 11.30 | 10.78 | 0.45 | 100 | 9.31 | 7.57 |
| hsa-miR-30a- | hsa-miR-30a- | 10.41 | 10.65 | 10.55 | 10.54 | 0.12 | 100 | 4.87 | 5.94 |
| 3p | 3p_st1 | | | | | | | | |
| hsa-miR-30a- | hsa-miR-30a- | 13.65 | 13.10 | 13.19 | 13.31 | 0.29 | 100 | 9.61 | 9.62 |
| 5p | 5p_st2 | | | | | | | | |
| hsa-miR-30b | hsa-miR-30b_st2 | 13.07 | 12.47 | 12.91 | 12.81 | 0.31 | 100 | 9.69 | 9.02 |
| hsa-miR-30c | hsa-miR-30c_st1 | 13.75 | 13.33 | 13.51 | 13.53 | 0.21 | 100 | 10.75 | 10.18 |
| hsa-miR-30d | hsa-miR-30d_st1 | 13.33 | 12.74 | 13.08 | 13.05 | 0.29 | 100 | 10.10 | 10.30 |
| hsa-miR-30e- | hsa-miR-30e- | 9.06 | 9.77 | 9.61 | 9.48 | 0.37 | 100 | 7.65 | 6.41 |
| 3p | 3p_st1 | | | | | | | | |
| hsa-miR-30e- | hsa-miR-30e- | 12.14 | 11.39 | 11.67 | 11.73 | 0.38 | 100 | 8.61 | 7.64 |
| 5p | 5p_st2 | | | | | | | | |
| hsa-miR-31 | hsa-miR-31_st2 | 10.75 | 8.14 | 9.29 | 9.39 | 1.31 | 100 | 5.67 | 6.96 |
| hsa-miR-320 | hsa-miR-320_st1 | 10.69 | 10.78 | 10.67 | 10.71 | 0.06 | 100 | 9.75 | 9.60 |
| hsa-miR-329 | hsa-miR-329_st1 | 7.54 | 5.43 | 6.75 | 6.57 | 1.07 | 100 | 2.99 | 3.24 |
| hsa-miR-335 | hsa-miR-335_st1 | 13.03 | 12.83 | 13.23 | 13.03 | 0.20 | 100 | 6.37 | 5.28 |
| hsa-miR-34a | hsa-miR-34a_st1 | 9.33 | 8.74 | 8.60 | 8.89 | 0.39 | 100 | 5.90 | 5.96 |
| hsa-miR-34b | hsa-miR-34b_st2 | 6.06 | 2.99 | 6.13 | 5.06 | 1.79 | 66.66 | 2.69 | 2.08 |
| hsa-miR-361 | hsa-miR-361_st2 | 11.47 | 11.05 | 11.33 | 11.29 | 0.21 | 100 | 8.58 | 8.30 |
| hsa-miR-362 | hsa-miR-362_st1 | 7.72 | 7.33 | 7.18 | 7.41 | 0.28 | 100 | 5.82 | 6.00 |
| hsa-miR-363 | hsa-miR-363_st2 | 8.31 | 9.13 | 9.71 | 9.05 | 0.70 | 100 | 6.24 | 7.00 |
| hsa-miR-365 | hsa-miR-365_st1 | 6.06 | 7.13 | 7.92 | 7.04 | 0.93 | 100 | 2.99 | 2.89 |
| hsa-miR-368 | hsa-miR-368_st2 | 10.88 | 9.03 | 10.47 | 10.13 | 0.97 | 100 | 1.54 | 1.35 |
| hsa-miR-369- | hsa-miR-369- | 8.27 | 5.63 | 7.34 | 7.08 | 1.34 | 100 | 1.83 | 1.62 |
| 5p | 5p_st2 | | | | | | | | |
| hsa-miR-375 | hsa-miR-375_st1 | 7.02 | 6.36 | 6.76 | 6.71 | 0.33 | 0 | 1.38 | 1.48 |
| hsa-miR-376a | hsa-miR-376a_st2 | 8.33 | 5.25 | 7.10 | 6.90 | 1.55 | 100 | 2.85 | 2.28 |
| hsa-miR-377 | hsa-miR-377_st1 | 6.95 | 4.94 | 7.42 | 6.44 | 1.32 | 100 | 1.83 | 1.86 |
| hsa-miR-379 | hsa-miR-379_st1 | 9.59 | 8.33 | 8.93 | 8.95 | 0.63 | 100 | 2.99 | 4.05 |
| hsa-miR-381 | hsa-miR-381_st2 | 7.94 | 5.40 | 6.69 | 6.68 | 1.27 | 66.66 | 4.18 | 2.37 |
| hsa-miR-382 | hsa-miR-382_st1 | 9.50 | 7.98 | 8.25 | 8.58 | 0.81 | 100 | 5.57 | 4.55 |
| hsa-miR-409- | hsa-miR-409- | 6.93 | 4.98 | 7.01 | 6.31 | 1.15 | 66.66 | 3.75 | 2.37 |
| 5p | 5p_st1 | | | | | | | | |
| hsa-miR-410 | hsa-miR-410_st1 | 6.26 | 3.13 | 5.92 | 5.11 | 1.72 | 66.66 | 2.31 | 3.24 |
| hsa-miR-411 | hsa-miR-411_st1 | 9.25 | 8.07 | 8.21 | 8.51 | 0.64 | 100 | 0.86 | 2.37 |
| hsa-miR-421 | hsa-miR-421- | 7.00 | 7.36 | 8.22 | 7.53 | 0.63 | 100 | 3.13 | 1.86 |
| | 3p_st1 | | | | | | | | |
| hsa-miR-422a | hsa-miR-422a_st1 | 10.90 | 11.75 | 11.25 | 11.30 | 0.42 | 100 | 6.93 | 6.31 |
| hsa-miR-422b | hsa-miR-422b_st2 | 12.13 | 12.79 | 11.99 | 12.30 | 0.43 | 100 | 8.48 | 8.85 |
| hsa-miR-423 | hsa-miR-423_st1 | 10.02 | 9.43 | 9.52 | 9.66 | 0.31 | 100 | 7.07 | 7.76 |
| hsa-miR-424 | hsa-miR-424_st1 | 9.13 | 6.45 | 8.54 | 8.04 | 1.41 | 100 | 1.83 | 1.62 |
| hsa-miR-425- | hsa-asg-14166_st2 | 10.37 | 10.38 | 10.61 | 10.46 | 0.13 | 100 | 8.42 | 8.16 |
| 5p | | | | | | | | | |
| hsa-miR-429 | hsa-miR-429_st1 | 8.53 | 7.14 | 8.50 | 8.05 | 0.79 | 100 | 1.83 | 3.60 |
| hsa-miR-432 | hsa-miR-432_st2 | 6.93 | 6.06 | 7.04 | 6.68 | 0.54 | 100 | 3.66 | 4.05 |
| hsa-miR-451 | hsa-miR-451_st1 | 13.45 | 13.23 | 13.92 | 13.53 | 0.35 | 100 | 7.73 | 8.54 |
| hsa-miR-452 | hsa-miR-452_st1 | 10.40 | 10.61 | 10.60 | 10.53 | 0.12 | 100 | 4.18 | 5.62 |
| hsa-miR-452* | hsa-miR-452-_st1 | 7.47 | 7.61 | 7.62 | 7.56 | 0.08 | 100 | 2.85 | 0.74 |
| hsa-miR-486 | hsa-miR-486_st2 | 10.51 | 11.75 | 11.69 | 11.32 | 0.70 | 100 | 5.26 | 6.46 |
| hsa-miR-487a | hsa-asg-6915_st1 | 7.92 | 6.50 | 7.12 | 7.18 | 0.71 | 100 | 5.60 | 4.91 |
| hsa-miR-487b | hsa-miR-487b_st2 | 10.01 | 7.76 | 8.93 | 8.90 | 1.13 | 100 | 4.66 | 4.19 |
| hsa-miR-489 | hsa-miR-489_st2 | 5.64 | 7.10 | 7.52 | 6.75 | 0.99 | 100 | 3.13 | 1.62 |
| hsa-miR-493- | hsa-miR-493- | 5.83 | 2.84 | 5.99 | 4.89 | 1.77 | 66.66 | 1.54 | 1.86 |
| 5p | 5p_st1 | | | | | | | | |
| hsa-miR-495 | hsa-miR-495_st1 | 9.05 | 7.23 | 8.32 | 8.20 | 0.91 | 100 | 2.69 | 2.28 |
| hsa-miR-497 | hsa-miR-497_st1 | 12.82 | 11.98 | 12.29 | 12.36 | 0.42 | 100 | 7.88 | 7.99 |
| hsa-miR-500 | hsa-miR-500_st1 | 8.23 | 7.89 | 7.97 | 8.03 | 0.18 | 100 | 7.11 | 7.14 |
| hsa-miR-503 | hsa-miR141_st1 | 8.87 | 7.69 | 8.46 | 8.34 | 0.60 | 66.66 | 5.61 | 6.69 |
| hsa-miR-505 | hsa-miR-505_st1 | 6.58 | 7.02 | 7.42 | 7.01 | 0.42 | 100 | 4.05 | 4.42 |
| hsa-miR-516- | hsa-miR-516- | 6.63 | 5.02 | 4.44 | 5.36 | 1.13 | 33.33 | 1.83 | 2.08 |
| 5p | 5p_st1 | | | | | | | | |
| hsa-miR-517a | hsa-miR-517a_st1 | 6.47 | 6.38 | 6.78 | 6.54 | 0.21 | 100 | 2.85 | 3.89 |
| hsa-miR-542- | hsa-miR-542- | 7.36 | 4.82 | 5.64 | 5.94 | 1.30 | 100 | 4.52 | 2.76 |
| 3p | 3p_st1 | | | | | | | | |
| hsa-miR-542- | hsa-miR-542- | 6.38 | 5.02 | 5.35 | 5.58 | 0.71 | 33.33 | 1.83 | 2.69 |
| 5p | 5p_st2 | | | | | | | | |
| hsa-miR-551b | hsa-miR-551b_st1 | 7.58 | 8.21 | 8.92 | 8.24 | 0.67 | 100 | 1.54 | 2.18 |
| hsa-miR-557 | hsa-miR-557_st1 | 9.23 | 9.95 | 9.51 | 9.56 | 0.37 | 100 | 8.65 | 8.44 |
| hsa-miR-565 | hsa-miR-565_st1 | 11.20 | 12.02 | 11.63 | 11.62 | 0.41 | 100 | 10.27 | 10.17 |
| hsa-miR-566 | hsa-miR-566_st1 | 6.27 | 5.66 | 7.29 | 6.41 | 0.83 | 0 | 9.40 | 9.08 |
| hsa-miR-574 | hsa-miR-574_st1 | 9.64 | 9.20 | 9.57 | 9.47 | 0.23 | 100 | 7.53 | 7.06 |
| hsa-miR-583 | hsa-miR-583_st1 | 6.99 | 6.41 | 7.00 | 6.80 | 0.34 | 100 | 2.85 | 2.76 |
| hsa-miR-598 | hsa-miR-598_st2 | 6.67 | 5.43 | 5.72 | 5.94 | 0.65 | 100 | 2.08 | 3.60 |
| hsa-miR-624 | hsa-miR-624_st2 | 4.85 | 3.48 | 5.96 | 4.76 | 1.24 | 66.66 | 3.13 | 2.45 |
| hsa-miR-628 | hsa-miR-628_st2 | 8.36 | 8.10 | 8.85 | 8.44 | 0.38 | 100 | 7.06 | 7.95 |
| hsa-miR-630 | hsa-miR-630_st1 | 4.69 | 4.07 | 5.16 | 4.64 | 0.55 | 66.66 | 3.25 | 2.89 |
| hsa-miR-655 | hsa-miR-655_st2 | 5.80 | 5.83 | 6.02 | 5.88 | 0.12 | 100 | 3.13 | 3.13 |
| hsa-miR-660 | hsa-miR-660_st1 | 9.49 | 8.95 | 9.54 | 9.33 | 0.33 | 100 | 6.78 | 6.45 |
| hsa-miR-9* | hsa-miR-9-_st2 | 5.20 | 3.68 | 5.47 | 4.78 | 0.97 | 66.66 | 2.51 | 3.52 |
| hsa-miR-92 | hsa-miR-92_st1 | 12.48 | 11.82 | 12.02 | 12.11 | 0.34 | 100 | 11.21 | 11.04 |
| hsa-miR-93 | hsa-miR-93_st2 | 11.12 | 10.65 | 11.02 | 10.93 | 0.25 | 100 | 7.78 | 8.07 |
| hsa-miR-96 | hsa-miR-96_st1 | 7.93 | 6.61 | 7.48 | 7.34 | 0.67 | 100 | 2.08 | 2.28 |
| hsa-miR-98 | hsa-miR-98_st1 | 10.17 | 9.90 | 11.00 | 10.36 | 0.57 | 100 | 6.21 | 5.76 |
| hsa-miR-99a | hsa-miR-99a_st2 | 13.81 | 13.33 | 13.59 | 13.58 | 0.24 | 100 | 9.44 | 9.42 |
| hsa-miR-99b | hsa-miR-99b_st1 | 11.39 | 11.21 | 11.42 | 11.34 | 0.12 | 66.66 | 8.04 | 8.22 |
| hsa-miR154 | hsa-miR154_st1 | 9.37 | 9.79 | 10.52 | 9.89 | 0.58 | 100 | 3.57 | 3.43 |
| hsa-miR144 | hsa-miR144_st2 | 8.26 | 7.44 | 7.91 | 7.87 | 0.41 | 100 | 1.83 | 1.86 |
| hsa-asg-9769 | hsa-asg-9769_st2 | 5.31 | 4.78 | 5.40 | 5.16 | 0.34 | 66.66 | 2.99 | 2.45 |
| hsa-asg-9483 | hsa-asg-9483_st1 | 9.93 | 10.78 | 10.42 | 10.38 | 0.43 | 100 | 8.18 | 8.15 |
| hsa-asg-9405 | hsa-asg-9405_st1 | 10.71 | 11.81 | 10.90 | 11.14 | 0.59 | 100 | 7.78 | 8.41 |
| hsa-asg-9253 | hsa-asg-9253_st2 | 2.72 | 2.05 | 2.80 | 2.52 | 0.41 | 0 | 7.20 | 7.06 |
| hsa-asg-9232 | hsa-asg-9232_st2 | 5.59 | 5.28 | 4.69 | 5.19 | 0.46 | 33.33 | 2.31 | 2.18 |
| hsa-asg-9200 | hsa-asg-9200_st1 | 6.30 | 5.93 | 5.60 | 5.94 | 0.35 | 100 | 4.05 | 3.96 |
| hsa-asg-9112 | hsa-asg-9112_st2 | 12.45 | 12.82 | 12.58 | 12.62 | 0.19 | 100 | 9.94 | 10.04 |
| hsa-asg-8901 | hsa-asg-8901_st2 | 13.45 | 14.00 | 13.44 | 13.63 | 0.32 | 100 | 12.30 | 12.23 |
| hsa-asg-860 | hsa-asg-860_st2 | 4.74 | 4.21 | 4.34 | 4.43 | 0.28 | 66.66 | 2.99 | 2.61 |
| hsa-asg-8195 | hsa-asg-8195_st2 | 0.52 | 1.79 | 1.37 | 1.23 | 0.65 | 0 | 8.27 | 6.86 |
| hsa-asg-7985 | hsa-asg-7985_st2 | 11.73 | 11.91 | 11.74 | 11.79 | 0.11 | 100 | 10.50 | 10.69 |
| hsa-asg-772 | hsa-asg-772_st1 | 10.13 | 9.69 | 9.88 | 9.90 | 0.22 | 100 | 8.93 | 8.65 |
| hsa-asg-7569 | hsa-asg-7569_st1 | 6.70 | 6.18 | 6.91 | 6.60 | 0.38 | 100 | 8.59 | 8.16 |
| hsa-asg-7461 | hsa-asg-7461_st2 | 8.40 | 8.38 | 8.67 | 8.49 | 0.16 | 100 | 6.81 | 7.17 |
| hsa-asg-7352 | hsa-asg-7352_st1 | 11.19 | 11.54 | 11.09 | 11.27 | 0.23 | 100 | 9.82 | 9.82 |
| hsa-asg-7189 | hsa-asg-7189_st1 | 11.80 | 12.20 | 11.68 | 11.89 | 0.27 | 100 | 10.08 | 10.02 |
| hsa-asg-7098 | hsa-asg-7098_st2 | 0.97 | 2.05 | 1.90 | 1.64 | 0.58 | 0 | 7.19 | 6.69 |
| hsa-asg-6957 | hsa-asg-6957_st1 | 11.54 | 11.83 | 11.58 | 11.65 | 0.16 | 100 | 9.90 | 10.05 |
| hsa-asg-6932 | hsa-asg-6932_st1 | 10.04 | 10.22 | 10.31 | 10.19 | 0.14 | 100 | 11.33 | 11.85 |
| hsa-asg-6870 | hsa-asg-6870_st1 | 11.52 | 12.13 | 11.65 | 11.76 | 0.32 | 100 | 10.37 | 10.61 |
| hsa-asg-680 | hsa-asg-680_st2 | 10.96 | 10.57 | 10.67 | 10.73 | 0.20 | 100 | 7.50 | 7.25 |
| hsa-asg-6457 | hsa-asg-6457_st2 | 5.16 | 4.82 | 5.52 | 5.17 | 0.35 | 66.66 | 3.36 | 3.43 |
| hsa-asg-6247 | hsa-asg-6247_st1 | 11.41 | 11.83 | 11.57 | 11.60 | 0.21 | 100 | 9.33 | 10.21 |
| hsa-asg-5998 | hsa-asg-5998_st1 | 12.95 | 13.38 | 12.94 | 13.09 | 0.25 | 100 | 9.50 | 9.14 |
| hsa-asg-5932 | hsa-asg-5932_st2 | 14.65 | 14.58 | 14.33 | 14.52 | 0.17 | 100 | 13.15 | 13.07 |
| hsa-asg-5760 | hsa-asg-5760_st1 | 1.78 | 1.48 | 2.12 | 1.79 | 0.32 | 0 | 7.21 | 5.52 |
| hsa-asg-5021 | hsa-asg-5021_st1 | 9.33 | 8.06 | 8.68 | 8.69 | 0.63 | 100 | 2.08 | 2.61 |
| hsa-asg-4557 | hsa-asg-4557_st2 | 6.80 | 6.45 | 7.75 | 7.00 | 0.67 | 100 | 3.25 | 3.60 |
| hsa-asg-4523 | hsa-asg-4523_st2 | 8.58 | 8.75 | 9.06 | 8.80 | 0.24 | 100 | 7.22 | 7.53 |
| hsa-asg-4515 | hsa-asg-4515_st1 | 4.74 | 4.39 | 5.01 | 4.71 | 0.31 | 66.66 | 2.31 | 2.08 |
| hsa-asg-4416 | hsa-asg-4416_st1 | 4.08 | 3.85 | 4.39 | 4.10 | 0.27 | 33.33 | 1.83 | 2.28 |
| hsa-asg-4350 | hsa-asg-4350_st1 | 2.10 | 2.05 | 1.07 | 1.74 | 0.58 | 0 | 6.11 | 5.72 |
| hsa-asg-4163 | hsa-asg-4163_st2 | 5.42 | 5.22 | 5.19 | 5.28 | 0.12 | 100 | 3.47 | 3.52 |
| hsa-asg-3998 | hsa-asg-3998_st1 | 10.96 | 11.63 | 11.04 | 11.21 | 0.37 | 100 | 8.72 | 8.11 |
| hsa-asg-3811 | hsa-asg-3811_st1 | 10.50 | 9.73 | 10.47 | 10.23 | 0.43 | 100 | 7.54 | 7.78 |
| hsa-asg-3604 | hsa-asg-3604_st1 | 5.42 | 5.53 | 5.56 | 5.50 | 0.07 | 100 | 3.25 | 3.43 |
| hsa-asg-3545 | hsa-asg-3545_st1 | 12.35 | 12.92 | 12.71 | 12.66 | 0.29 | 100 | 11.08 | 11.06 |
| hsa-asg-3167 | hsa-asg-3167_st1 | 11.18 | 11.62 | 11.20 | 11.33 | 0.25 | 100 | 10.03 | 10.46 |
| hsa-asg-3138 | hsa-asg-3138_st2 | 10.03 | 10.20 | 9.96 | 10.06 | 0.13 | 100 | 8.57 | 7.95 |
| hsa-asg-2944 | hsa-asg-2944_st2 | 4.94 | 4.69 | 5.25 | 4.96 | 0.28 | 66.66 | 3.13 | 2.76 |
| hsa-asg-2824 | hsa-asg-2824_st2 | 10.09 | 9.58 | 9.80 | 9.82 | 0.25 | 100 | 11.24 | 11.16 |
| hsa-asg-2785 | hsa-asg-2785_st2 | 12.53 | 12.86 | 12.60 | 12.66 | 0.17 | 100 | 10.07 | 9.83 |
| hsa-asg-2750 | hsa-asg-2750_st2 | 13.06 | 13.59 | 13.25 | 13.30 | 0.27 | 100 | 12.15 | 12.06 |
| hsa-asg-2739 | hsa-asg-2739_st2 | 11.51 | 11.56 | 11.59 | 11.55 | 0.04 | 100 | 10.25 | 10.50 |
| hsa-asg-253 | hsa-asg-253_st2 | 10.62 | 10.66 | 10.91 | 10.73 | 0.16 | 100 | 9.25 | 9.00 |
| hsa-asg-2445 | hsa-asg-2445_st1 | 1.40 | 1.14 | 2.80 | 1.78 | 0.89 | 0 | 7.58 | 6.32 |
| hsa-asg-2073 | hsa-asg-2073_st1 | 4.99 | 5.09 | 4.65 | 4.91 | 0.23 | 100 | 2.69 | 3.34 |
| hsa-asg-1895 | hsa-asg-1895_st1 | 11.90 | 12.35 | 12.07 | 12.11 | 0.23 | 100 | 9.77 | 10.32 |
| hsa-asg-1514 | hsa-asg-1514_st1 | 8.50 | 8.56 | 9.20 | 8.75 | 0.39 | 66.66 | 7.01 | 6.78 |
| hsa-asg-1468 | hsa-asg-1468_st2 | 10.54 | 10.81 | 10.28 | 10.54 | 0.26 | 100 | 8.93 | 9.35 |
| hsa-asg-14238 | hsa-asg-14238_st1 | 7.28 | 8.04 | 8.32 | 7.88 | 0.54 | 100 | 3.98 | 3.02 |
| hsa-asg-14204 | hsa-asg-14204_st1 | 7.77 | 7.41 | 7.71 | 7.63 | 0.19 | 0 | 8.61 | 9.00 |
| hsa-asg-14186 | hsa-asg-14186_st1 | 5.04 | 5.22 | 4.18 | 4.81 | 0.56 | 66.66 | 2.08 | 2.89 |
| hsa-asg-14175 | hsa-asg-14175_st1 | 6.71 | 5.19 | 6.89 | 6.26 | 0.94 | 100 | 2.08 | 2.45 |
| hsa-asg-14170 | hsa-asg-14170_st1 | 8.43 | 7.96 | 8.80 | 8.39 | 0.42 | 100 | 4.05 | 2.76 |
| hsa-asg-14146 | hsa-asg-14146_st1 | 7.31 | 7.20 | 6.64 | 7.05 | 0.36 | 100 | 2.31 | 1.35 |
| hsa-asg-14134 | hsa-asg-14134_st1 | 8.50 | 8.53 | 9.30 | 8.78 | 0.46 | 100 | 4.36 | 5.06 |
| hsa-asg-14038 | hsa-asg-14038_st1 | 11.72 | 12.67 | 11.93 | 12.11 | 0.50 | 100 | 9.86 | 9.77 |
| hsa-asg-13770 | hsa-asg-13770_st1 | 9.71 | 9.98 | 9.78 | 9.82 | 0.14 | 100 | 8.10 | 8.15 |
| hsa-asg-13403 | hsa-asg-13403_st2 | 9.92 | 10.32 | 10.16 | 10.13 | 0.20 | 100 | 7.81 | 6.98 |
| hsa-asg-13354 | hsa-asg-13354_st1 | 11.86 | 11.65 | 11.11 | 11.54 | 0.38 | 100 | 13.89 | 13.61 |
| hsa-asg-13312 | hsa-asg-13312_st2 | 5.12 | 5.94 | 4.34 | 5.13 | 0.80 | 0 | 10.57 | 9.78 |
| hsa-asg-13258 | hsa-asg-13258_st2 | 9.08 | 8.75 | 9.47 | 9.10 | 0.36 | 100 | 4.52 | 5.79 |
| hsa-asg-13254 | hsa-asg-13254_st1 | 9.42 | 8.19 | 8.42 | 8.67 | 0.65 | 100 | 1.22 | 1.74 |
| hsa-asg-13244 | hsa-asg-13244_st1 | 7.74 | 7.69 | 7.50 | 7.64 | 0.13 | 100 | 9.72 | 9.15 |
| hsa-asg-13205 | hsa-asg-13205_st1 | 7.97 | 8.87 | 8.92 | 8.59 | 0.53 | 100 | 2.31 | 4.05 |
| hsa-asg-13127 | hsa-asg-13127_st2 | 7.91 | 7.26 | 7.17 | 7.45 | 0.41 | 100 | 4.36 | 5.24 |
| hsa-asg-12949 | hsa-asg-12949_st1 | 9.15 | 9.71 | 9.27 | 9.37 | 0.29 | 100 | 7.86 | 8.12 |
| hsa-asg-12902 | hsa-asg-12902_st1 | 8.22 | 7.43 | 7.37 | 7.67 | 0.48 | 100 | 9.63 | 9.46 |
| hsa-asg-12885 | hsa-asg-12885_st1 | 4.94 | 4.86 | 4.95 | 4.92 | 0.05 | 100 | 3.13 | 2.76 |
| hsa-asg-12765 | hsa-asg-12765_st2 | 5.35 | 4.94 | 5.22 | 5.17 | 0.21 | 100 | 2.69 | 1.62 |
| hsa-asg-12729 | hsa-asg-12729_st1 | 13.40 | 13.73 | 13.33 | 13.49 | 0.21 | 100 | 11.43 | 11.17 |
| hsa-asg-12600 | hsa-asg-12600_st2 | 9.42 | 9.75 | 9.38 | 9.52 | 0.20 | 100 | 8.59 | 8.54 |
| hsa-asg-12471 | hsa-asg-12471_st1 | 3.58 | 3.58 | 3.64 | 3.60 | 0.04 | 100 | 2.31 | 1.86 |
| hsa-asg-12423 | hsa-asg-12423_st1 | 9.06 | 9.38 | 9.54 | 9.32 | 0.24 | 0 | 8.31 | 8.04 |
| hsa-asg-12406 | hsa-asg-12406_st1 | 11.32 | 12.10 | 11.36 | 11.59 | 0.44 | 100 | 9.09 | 9.21 |
| hsa-asg-12372 | hsa-asg-12372_st2 | 12.13 | 12.41 | 12.20 | 12.25 | 0.14 | 100 | 10.40 | 10.36 |
| hsa-asg-12192 | hsa-asg-12192_st2 | 9.42 | 9.83 | 9.68 | 9.64 | 0.21 | 100 | 8.15 | 8.50 |
| hsa-asg-11896 | hsa-asg-11896_st2 | 12.78 | 13.36 | 13.35 | 13.17 | 0.33 | 100 | 11.65 | 11.91 |
| hsa-asg-11867 | hsa-asg-11867_st1 | 4.90 | 4.78 | 4.65 | 4.78 | 0.12 | 100 | 2.85 | 2.89 |
| hsa-asg-11844 | hsa-asg-11844_st2 | 4.08 | 4.39 | 4.12 | 4.19 | 0.17 | 33.33 | 2.51 | 2.28 |
| hsa-asg-11764 | hsa-asg-11764_st1 | 5.20 | 5.16 | 5.16 | 5.17 | 0.02 | 100 | 3.36 | 3.75 |
| hsa-asg-11572 | hsa-asg-11572_st2 | 12.16 | 12.58 | 12.04 | 12.26 | 0.28 | 100 | 10.81 | 10.76 |
| hsa-asg-11527 | hsa-asg-11527_st1 | 4.38 | 4.39 | 3.87 | 4.21 | 0.30 | 66.66 | 2.51 | 2.76 |
| hsa-asg-11515 | hsa-asg-11515_st2 | 11.93 | 12.61 | 12.18 | 12.24 | 0.34 | 100 | 9.93 | 10.38 |
| hsa-asg-11486 | hsa-asg-11486_st1 | 12.36 | 12.88 | 12.34 | 12.53 | 0.31 | 100 | 10.79 | 10.88 |
| hsa-asg-11443 | hsa-asg-11443_st1 | 8.75 | 7.37 | 7.62 | 7.91 | 0.74 | 100 | 2.99 | 4.25 |
| hsa-asg-11428 | hsa-asg-11428_st2 | 1.19 | 1.14 | 2.65 | 1.66 | 0.86 | 0 | 6.50 | 5.67 |
| hsa-asg-114 | hsa-asg-114_st2 | 9.09 | 9.12 | 9.09 | 9.10 | 0.02 | 100 | 7.40 | 7.70 |
| hsa-asg-11373 | hsa-asg-11373_st1 | 10.53 | 10.46 | 10.38 | 10.46 | 0.07 | 100 | 9.23 | 9.31 |
| hsa-asg-11199 | hsa-asg-11199_st2 | 12.41 | 12.19 | 12.23 | 12.28 | 0.12 | 100 | 9.96 | 9.33 |
| hsa-asg-10981 | hsa-asg-10981_st1 | 4.74 | 4.55 | 4.88 | 4.72 | 0.17 | 66.66 | 3.13 | 3.34 |
| hsa-asg-10883 | hsa-asg-10883_st1 | 9.08 | 8.50 | 8.12 | 8.57 | 0.49 | 100 | 3.98 | 3.56 |
| hsa-asg-10577 | hsa-asg-10577_st1 | 12.54 | 12.70 | 12.75 | 12.66 | 0.11 | 100 | 10.81 | 10.79 |
| hsa-asg-10473 | hsa-asg-10473_st1 | 5.04 | 4.33 | 4.91 | 4.76 | 0.38 | 66.66 | 2.69 | 2.61 |
| hsa-asg-10409 | hsa-asg-10409_st1 | 4.08 | 4.39 | 4.29 | 4.25 | 0.16 | 33.33 | 2.85 | 2.61 |
| hsa-asg-10401 | hsa-asg-10401_st1 | 4.85 | 5.22 | 4.81 | 4.96 | 0.23 | 100 | 3.13 | 3.13 |
| hsa-asg-10154 | hsa-asg-10154_st1 | 11.77 | 12.13 | 11.83 | 11.91 | 0.19 | 100 | 8.84 | 9.78 |
| hsa-asg-10113 | hsa-asg-10113_st1 | 3.80 | 4.69 | 4.23 | 4.24 | 0.45 | 33.33 | 1.83 | 1.62 |
| hsa-asg-10065 | hsa-asg-10065_st1 | 3.80 | 4.49 | 4.12 | 4.14 | 0.35 | 33.33 | 2.31 | 2.45 |
| hsa-miR257 | hsa-miR257_st1 | 8.77 | 8.26 | 9.39 | 8.81 | 0.57 | 100 | 4.12 | 2.61 |
| hsa-miR229 | hsa-miR229_st1 | 3.45 | 3.26 | 2.93 | 3.21 | 0.26 | 0 | 2.31 | 2.28 |
| hsa-miR223 | hsa-miR223_st2 | 8.08 | 7.69 | 7.55 | 7.77 | 0.28 | 0 | 8.71 | 8.58 |
| hsa-miR207 | hsa-miR207_st1 | 9.05 | 9.13 | 9.08 | 9.08 | 0.04 | 100 | 7.26 | 7.56 |
| hsa-miR189 | hsa-miR189_st2 | 8.22 | 8.77 | 8.59 | 8.52 | 0.28 | 66.66 | 7.44 | 8.09 |
| hsa-miR166 | hsa-miR166_st1 | 7.61 | 7.47 | 7.72 | 7.60 | 0.13 | 0 | 7.27 | 6.88 |
| hsa-miR157 | hsa-miR157_st2 | 9.96 | 8.40 | 8.87 | 9.08 | 0.80 | 100 | 5.99 | 6.22 |
| hsa-miR120 | hsa-miR120_st2 | 2.10 | 1.79 | 1.65 | 1.84 | 0.23 | 0 | 2.31 | 2.28 |
| hsa-miR102 | hsa-miR102_st2 | 7.78 | 8.06 | 8.39 | 8.08 | 0.30 | 100 | 6.16 | 6.22 |
| hsa-asg-999 | hsa-asg-999_st2 | 7.27 | 6.76 | 8.43 | 7.49 | 0.85 | 100 | 6.33 | 6.30 |
| hsa-asg-9927 | hsa-asg-9927_st2 | 4.31 | 3.68 | 3.64 | 3.88 | 0.38 | 0 | 6.94 | 6.79 |
| hsa-asg-9886 | hsa-asg-9886_st2 | 8.96 | 8.76 | 8.79 | 8.84 | 0.11 | 100 | 8.25 | 8.68 |
| hsa-asg-9880 | hsa-asg-9880_st2 | 11.60 | 11.83 | 11.64 | 11.69 | 0.13 | 100 | 11.19 | 10.84 |
| hsa-asg-9874 | hsa-asg-9874_st1 | 13.01 | 13.49 | 12.92 | 13.14 | 0.31 | 100 | 12.65 | 12.53 |
| hsa-asg-9858 | hsa-asg-9858_st2 | 8.77 | 9.18 | 9.08 | 9.01 | 0.21 | 100 | 6.90 | 8.29 |
| hsa-asg-9845 | hsa-asg-9845_st1 | 3.32 | 1.79 | 1.90 | 2.33 | 0.85 | 0 | 6.53 | 5.47 |
| hsa-asg-9735 | hsa-asg-9735_st1 | 7.00 | 6.54 | 6.81 | 6.78 | 0.23 | 100 | 5.84 | 6.60 |
| hsa-asg-9729 | hsa-asg-9729_st2 | 9.18 | 9.30 | 9.11 | 9.20 | 0.10 | 100 | 7.90 | 8.11 |
| hsa-asg-9714 | hsa-asg-9714_st1 | 2.10 | 2.05 | 1.90 | 2.02 | 0.11 | 0 | 3.25 | 3.13 |
| hsa-asg-9696 | hsa-asg-9696_st1 | 7.80 | 5.81 | 6.32 | 6.64 | 1.03 | 66.66 | 2.69 | 4.55 |
| hsa-asg-9665 | hsa-asg-9665_st2 | 11.37 | 11.70 | 11.78 | 11.62 | 0.22 | 100 | 12.43 | 12.36 |
| hsa-asg-9649 | hsa-asg-9649_st1 | 3.00 | 1.79 | 1.07 | 1.95 | 0.98 | 0 | 7.32 | 6.65 |
| hsa-asg-9625 | hsa-asg-9625_st2 | 9.96 | 10.03 | 10.38 | 10.13 | 0.23 | 100 | 11.17 | 10.45 |
| hsa-asg-9610 | hsa-asg-9610_st1 | 2.38 | 2.05 | 2.12 | 2.18 | 0.17 | 0 | 4.52 | 4.69 |
| hsa-asg-9575 | hsa-asg-9575_st1 | 6.08 | 4.98 | 4.18 | 5.08 | 0.96 | 66.66 | 3.13 | 4.19 |
| hsa-asg-9573 | hsa-asg-9573_st2 | 6.20 | 7.96 | 7.24 | 7.14 | 0.88 | 100 | 6.13 | 5.60 |
| hsa-asg-9569 | hsa-asg-9569_st2 | 0.97 | 0.78 | 1.37 | 1.04 | 0.30 | 0 | 2.31 | 1.62 |
| hsa-asg-9562 | hsa-asg-9562_st2 | 4.97 | 4.74 | 5.56 | 5.09 | 0.42 | 33.33 | 2.31 | 3.07 |
| hsa-asg-9559 | hsa-asg-9559_st2 | 6.34 | 5.95 | 5.74 | 6.01 | 0.31 | 66.66 | 4.36 | 3.72 |
| hsa-asg-9547 | hsa-asg-9547_st2 | 6.26 | 6.55 | 6.13 | 6.31 | 0.22 | 100 | 6.50 | 6.73 |
| hsa-asg-9530 | hsa-asg-9530_st2 | 13.28 | 13.61 | 13.44 | 13.44 | 0.16 | 100 | 12.66 | 12.64 |
| hsa-asg-9521 | hsa-asg-9521_st2 | 4.24 | 3.93 | 2.80 | 3.65 | 0.76 | 33.33 | 2.08 | 2.08 |
| hsa-asg-9508 | hsa-asg-9508_st1 | 12.06 | 12.47 | 12.36 | 12.30 | 0.21 | 100 | 10.32 | 11.21 |
| hsa-asg-9503 | hsa-asg-9503_st2 | 12.20 | 12.31 | 12.16 | 12.22 | 0.08 | 100 | 12.62 | 12.46 |
| hsa-asg-9486 | hsa-asg-9486_st2 | 4.80 | 4.39 | 2.93 | 4.04 | 0.98 | 0 | 5.02 | 5.65 |
| hsa-asg-9476 | hsa-asg-9476_st1 | 1.78 | 3.26 | 2.49 | 2.51 | 0.74 | 0 | 4.98 | 6.46 |
| hsa-asg-9457 | hsa-asg-9457_st1 | 11.93 | 11.88 | 11.86 | 11.89 | 0.03 | 100 | 12.35 | 12.41 |
| hsa-asg-9434 | hsa-asg-9434_st2 | 9.11 | 9.14 | 8.81 | 9.02 | 0.18 | 100 | 8.69 | 8.70 |
| hsa-asg-9411 | hsa-asg-9411_st1 | 4.90 | 3.93 | 4.48 | 4.44 | 0.49 | 66.66 | 2.99 | 3.02 |
| hsa-asg-9368 | hsa-asg-9368_st2 | 8.91 | 8.48 | 9.18 | 8.85 | 0.36 | 100 | 7.51 | 7.41 |
| hsa-asg-9332 | hsa-asg-9332_st2 | 9.83 | 9.88 | 9.78 | 9.83 | 0.05 | 100 | 9.67 | 9.50 |
| hsa-asg-9319 | hsa-asg-9319_st2 | 8.17 | 8.33 | 7.87 | 8.13 | 0.23 | 100 | 7.29 | 7.55 |
| hsa-asg-9297 | hsa-asg-9297_st2 | 6.31 | 5.51 | 4.06 | 5.29 | 1.14 | 33.33 | 3.57 | 3.19 |
| hsa-asg-9273 | hsa-asg-9273_st2 | 11.24 | 11.49 | 11.31 | 11.34 | 0.13 | 100 | 11.79 | 11.59 |
| hsa-asg-925 | hsa-asg-925_st1 | 6.71 | 7.01 | 6.64 | 6.79 | 0.20 | 100 | 3.25 | 5.36 |
| hsa-asg-9248 | hsa-asg-9248_st2 | 10.01 | 10.12 | 10.03 | 10.06 | 0.06 | 100 | 10.30 | 10.23 |
| hsa-asg-924 | hsa-asg-924_st1 | 8.38 | 5.43 | 6.98 | 6.93 | 1.48 | 100 | 1.83 | 1.05 |
| hsa-asg-922 | hsa-asg-922_st1 | 7.30 | 7.80 | 7.27 | 7.46 | 0.30 | 100 | 2.99 | 5.05 |
| hsa-asg-9212 | hsa-asg-9212_st2 | 2.82 | 4.17 | −0.45 | 2.18 | 2.38 | 0 | 8.95 | 9.07 |
| hsa-asg-916 | hsa-asg-916_st1 | 10.61 | 11.19 | 10.35 | 10.72 | 0.43 | 100 | 9.84 | 10.14 |
| hsa-asg-914 | hsa-asg-914_st1 | 10.58 | 10.76 | 10.35 | 10.56 | 0.20 | 100 | 10.32 | 9.74 |
| hsa-asg-9128 | hsa-asg-9128_st1 | 8.39 | 8.42 | 8.63 | 8.48 | 0.13 | 100 | 7.78 | 7.64 |
| hsa-asg-9120 | hsa-asg-9120_st2 | 9.59 | 9.25 | 8.80 | 9.22 | 0.40 | 100 | 8.66 | 8.39 |
| hsa-asg-9099 | hsa-asg-9099_st2 | 6.18 | 7.04 | 6.04 | 6.42 | 0.54 | 100 | 4.95 | 5.55 |
| hsa-asg-9092 | hsa-asg-9092_st2 | 12.44 | 12.49 | 12.32 | 12.42 | 0.08 | 100 | 12.99 | 12.57 |
| hsa-asg-9082 | hsa-asg-9082_st1 | 7.28 | 6.99 | 8.28 | 7.52 | 0.68 | 33.33 | 3.31 | 6.55 |
| hsa-asg-9060 | hsa-asg-9060_st1 | 8.37 | 7.94 | 8.12 | 8.14 | 0.21 | 100 | 7.23 | 7.85 |
| hsa-asg-9052 | hsa-asg-9052_st1 | 7.71 | 7.51 | 7.90 | 7.71 | 0.20 | 0 | 9.06 | 9.11 |
| hsa-asg-9025 | hsa-asg-9025_st2 | 8.23 | 7.65 | 7.79 | 7.89 | 0.30 | 100 | 7.20 | 7.35 |
| hsa-asg-9008 | hsa-asg-9008_st2 | 1.40 | 2.84 | 0.42 | 1.56 | 1.22 | 0 | 5.02 | 4.11 |
| hsa-asg-9004 | hsa-asg-9004_st1 | 9.67 | 10.40 | 9.62 | 9.90 | 0.44 | 100 | 8.69 | 8.62 |
| hsa-asg-8972 | hsa-asg-8972_st2 | 6.35 | 6.81 | 6.46 | 6.54 | 0.24 | 100 | 2.08 | 4.55 |
| hsa-asg-8970 | hsa-asg-8970_st2 | 5.22 | 4.90 | 4.95 | 5.02 | 0.17 | 0 | 6.59 | 6.68 |
| hsa-asg-8957 | hsa-asg-8957_st2 | 9.88 | 10.19 | 9.80 | 9.96 | 0.21 | 100 | 9.50 | 9.63 |
| hsa-asg-8955 | hsa-asg-8955_st2 | 8.59 | 9.23 | 7.76 | 8.53 | 0.74 | 100 | 1.54 | 6.26 |
| hsa-asg-8953 | hsa-asg-8953_st1 | 11.30 | 11.51 | 11.19 | 11.34 | 0.16 | 100 | 10.60 | 10.32 |
| hsa-asg-8928 | hsa-asg-8928_st2 | 8.56 | 8.61 | 8.80 | 8.65 | 0.13 | 66.66 | 8.07 | 8.25 |
| hsa-asg-8925 | hsa-asg-8925_st2 | 6.77 | 1.79 | −1.17 | 2.46 | 4.02 | 0 | 9.22 | 8.13 |
| hsa-asg-8889 | hsa-asg-8889_st1 | 5.44 | 6.64 | 6.27 | 6.11 | 0.62 | 66.66 | 4.24 | 4.22 |
| hsa-asg-8882 | hsa-asg-8882_st1 | 5.95 | 7.77 | 7.23 | 6.98 | 0.94 | 100 | 5.25 | 6.15 |
| hsa-asg-8878 | hsa-asg-8878_st2 | 10.88 | 11.07 | 10.92 | 10.95 | 0.10 | 100 | 10.17 | 9.78 |
| hsa-asg-8872 | hsa-asg-8872_st1 | 8.88 | 8.53 | 8.71 | 8.71 | 0.17 | 100 | 10.12 | 9.90 |
| hsa-asg-8770 | hsa-asg-8770_st1 | 6.35 | 5.19 | 4.98 | 5.51 | 0.74 | 100 | 4.24 | 3.52 |
| hsa-asg-8757 | hsa-asg-8757_st2 | 2.24 | 1.48 | 2.12 | 1.95 | 0.41 | 0 | 5.31 | 4.17 |
| hsa-asg-8699 | hsa-asg-8699_st2 | 3.74 | 4.21 | 4.44 | 4.13 | 0.35 | 0 | 6.04 | 6.22 |
| hsa-asg-8687 | hsa-asg-8687_st1 | 9.48 | 10.10 | 9.18 | 9.59 | 0.47 | 100 | 8.96 | 8.64 |
| hsa-asg-8670 | hsa-asg-8670_st2 | 1.78 | 1.79 | 2.12 | 1.89 | 0.19 | 0 | 3.91 | 2.76 |
| hsa-asg-8642 | hsa-asg-8642_st1 | 6.07 | 4.82 | 5.45 | 5.45 | 0.63 | 33.33 | 4.52 | 4.11 |
| hsa-asg-8623 | hsa-asg-8623_st1 | 10.09 | 10.07 | 9.69 | 9.95 | 0.23 | 100 | 9.73 | 9.58 |
| hsa-asg-8617 | hsa-asg-8617_st1 | 11.23 | 11.62 | 10.91 | 11.25 | 0.36 | 100 | 10.54 | 9.86 |
| hsa-asg-8607 | hsa-asg-8607_st1 | 10.34 | 10.59 | 10.05 | 10.33 | 0.27 | 100 | 9.60 | 9.71 |
| hsa-asg-8602 | hsa-asg-8602_st2 | 7.54 | 7.15 | 7.43 | 7.37 | 0.20 | 0 | 7.66 | 7.70 |
| hsa-asg-8579 | hsa-asg-8579_st2 | 5.48 | 4.44 | 4.23 | 4.72 | 0.67 | 66.66 | 2.85 | 2.45 |
| hsa-asg-8576 | hsa-asg-8576_st2 | 11.99 | 12.14 | 12.11 | 12.08 | 0.08 | 100 | 11.95 | 11.80 |
| hsa-asg-8520 | hsa-asg-8520_st1 | 10.74 | 11.10 | 10.72 | 10.85 | 0.22 | 100 | 10.62 | 10.48 |
| hsa-asg-8518 | hsa-asg-8518_st1 | 9.15 | 8.93 | 9.08 | 9.06 | 0.11 | 100 | 8.22 | 7.29 |
| hsa-asg-8515 | hsa-asg-8515_st2 | 10.77 | 10.84 | 10.60 | 10.74 | 0.12 | 100 | 11.29 | 11.20 |
| hsa-asg-8510 | hsa-asg-8510_st1 | 10.83 | 10.51 | 10.54 | 10.63 | 0.18 | 100 | 9.97 | 10.28 |
| hsa-asg-8459 | hsa-asg-8459_st1 | 9.01 | 9.81 | 9.25 | 9.36 | 0.41 | 100 | 8.78 | 8.78 |
| hsa-asg-8454 | hsa-asg-8454_st1 | 6.04 | 5.48 | 5.82 | 5.78 | 0.28 | 100 | 4.24 | 3.52 |
| hsa-asg-8450 | hsa-asg-8450_st1 | 10.49 | 10.75 | 10.54 | 10.59 | 0.14 | 100 | 11.89 | 11.69 |
| hsa-asg-8444 | hsa-asg-8444_st2 | 8.08 | 8.92 | 8.32 | 8.44 | 0.43 | 100 | 6.31 | 7.20 |
| hsa-asg-8421 | hsa-asg-8421_st1 | 11.26 | 11.31 | 11.48 | 11.35 | 0.12 | 100 | 11.04 | 10.86 |
| hsa-asg-8411 | hsa-asg-8411_st2 | 6.65 | 6.74 | 5.49 | 6.30 | 0.70 | 100 | 4.91 | 3.52 |
| hsa-asg-8391 | hsa-asg-8391_st1 | 7.73 | 8.38 | 8.36 | 8.16 | 0.37 | 100 | 7.21 | 6.76 |
| hsa-asg-8379 | hsa-asg-8379_st2 | 7.65 | 6.88 | 6.80 | 7.11 | 0.47 | 100 | 3.98 | 5.32 |
| hsa-asg-8357 | hsa-asg-8357_st1 | 4.38 | 4.33 | 3.56 | 4.09 | 0.46 | 33.33 | 2.69 | 1.86 |
| hsa-asg-8300 | hsa-asg-8300_st2 | 6.27 | 6.46 | 4.06 | 5.60 | 1.33 | 66.66 | 4.47 | 3.64 |
| hsa-asg-8297 | hsa-asg-8297_st2 | 5.08 | 3.93 | 4.61 | 4.54 | 0.58 | 66.66 | 3.13 | 3.43 |
| hsa-asg-8282 | hsa-asg-8282_st1 | 3.69 | 3.58 | 3.87 | 3.71 | 0.14 | 0 | 6.06 | 6.15 |
| hsa-asg-8280 | hsa-asg-8280_st2 | 0.97 | 2.29 | 3.47 | 2.24 | 1.25 | 0 | 6.97 | 5.96 |
| hsa-asg-8257 | hsa-asg-8257_st1 | 8.07 | 8.83 | 8.67 | 8.53 | 0.40 | 100 | 6.38 | 7.06 |
| hsa-asg-8253 | hsa-asg-8253_st2 | 11.94 | 12.11 | 11.78 | 11.94 | 0.17 | 100 | 11.32 | 11.21 |
| hsa-asg-8227 | hsa-asg-8227_st2 | 9.87 | 9.93 | 10.25 | 10.02 | 0.20 | 100 | 9.59 | 9.58 |
| hsa-asg-8221 | hsa-asg-8221_st2 | 10.50 | 11.37 | 10.69 | 10.85 | 0.46 | 100 | 9.83 | 9.79 |
| hsa-asg-8197 | hsa-asg-8197_st2 | 6.17 | 6.32 | 5.74 | 6.08 | 0.30 | 100 | 5.31 | 5.11 |
| hsa-asg-8163 | hsa-asg-8163_st1 | 12.32 | 12.24 | 12.10 | 12.22 | 0.11 | 100 | 12.99 | 12.77 |
| hsa-asg-8137 | hsa-asg-8137_st2 | 6.67 | 7.80 | 7.93 | 7.47 | 0.70 | 100 | 6.13 | 6.03 |
| hsa-asg-8130 | hsa-asg-8130_st2 | −0.33 | 5.60 | −1.26 | 1.34 | 3.72 | 0 | 8.17 | 7.23 |
| hsa-asg-8121 | hsa-asg-8121_st2 | 7.96 | 8.16 | 8.31 | 8.14 | 0.18 | 33.33 | 7.35 | 7.75 |
| hsa-asg-8099 | hsa-asg-8099_st2 | 2.10 | 2.05 | 4.34 | 2.83 | 1.31 | 0 | 4.71 | 5.14 |
| hsa-asg-8084 | hsa-asg-8084_st2 | 1.40 | 1.48 | 1.90 | 1.59 | 0.26 | 0 | 2.08 | 2.08 |
| hsa-asg-8055 | hsa-asg-8055_st2 | 6.50 | 4.07 | 4.95 | 5.17 | 1.23 | 66.66 | 1.83 | 1.62 |
| hsa-asg-8054 | hsa-asg-8054_st1 | 4.24 | 3.85 | 3.47 | 3.85 | 0.38 | 33.33 | 2.08 | 1.86 |
| hsa-asg-8042 | hsa-asg-8042_st2 | 9.27 | 8.28 | 9.05 | 8.87 | 0.52 | 100 | 11.02 | 11.08 |
| hsa-asg-8036 | hsa-asg-8036_st2 | 7.43 | 6.76 | 6.61 | 6.93 | 0.44 | 100 | 4.71 | 4.59 |
| hsa-asg-8002 | hsa-asg-8002_st2 | 9.89 | 10.42 | 9.32 | 9.88 | 0.55 | 100 | 8.43 | 6.55 |
| hsa-asg-7973 | hsa-asg-7973_st2 | 9.76 | 10.45 | 9.78 | 10.00 | 0.39 | 100 | 9.01 | 8.80 |
| hsa-asg-7964 | hsa-asg-7964_st2 | 6.27 | 5.16 | 5.49 | 5.64 | 0.57 | 66.66 | 6.55 | 7.27 |
| hsa-asg-7952 | hsa-asg-7952_st2 | 0.97 | 1.48 | 1.65 | 1.37 | 0.35 | 0 | 2.31 | 3.68 |
| hsa-asg-7939 | hsa-asg-7939_st1 | 13.56 | 13.72 | 13.63 | 13.64 | 0.08 | 100 | 14.14 | 14.01 |
| hsa-asg-7930 | hsa-asg-7930_st1 | 8.06 | 8.23 | 8.31 | 8.20 | 0.13 | 66.66 | 9.69 | 8.96 |
| hsa-asg-791 | hsa-asg-791_st1 | 5.08 | 3.68 | 4.12 | 4.29 | 0.72 | 33.33 | 1.83 | 2.89 |
| hsa-asg-7900 | hsa-asg-7900_st1 | 10.00 | 10.66 | 9.72 | 10.13 | 0.48 | 100 | 8.00 | 8.66 |
| hsa-asg-7859 | hsa-asg-7859_st1 | 12.07 | 12.23 | 12.13 | 12.14 | 0.08 | 100 | 11.64 | 11.47 |
| hsa-asg-7777 | hsa-asg-7777_st2 | 8.62 | 9.49 | 9.42 | 9.18 | 0.48 | 66.66 | 7.92 | 7.70 |
| hsa-asg-7770 | hsa-asg-7770_st2 | 8.91 | 10.10 | 8.96 | 9.32 | 0.68 | 100 | 7.05 | 6.94 |
| hsa-asg-7753 | hsa-asg-7753_st2 | 12.46 | 12.38 | 12.20 | 12.35 | 0.13 | 100 | 12.90 | 12.81 |
| hsa-asg-7751 | hsa-asg-7751_st2 | 4.69 | 6.84 | 6.79 | 6.10 | 1.23 | 66.66 | 3.25 | 3.64 |
| hsa-asg-7749 | hsa-asg-7749_st1 | 7.60 | 8.16 | 7.82 | 7.86 | 0.28 | 33.33 | 8.04 | 8.75 |
| hsa-asg-773 | hsa-asg-773_st1 | 10.55 | 11.12 | 11.09 | 10.92 | 0.32 | 100 | 9.19 | 9.91 |
| hsa-asg-7721 | hsa-asg-7721_st1 | 8.49 | 8.32 | 8.93 | 8.58 | 0.31 | 100 | 6.79 | 7.22 |
| hsa-asg-7704 | hsa-asg-7704_st2 | 8.57 | 8.69 | 8.06 | 8.44 | 0.34 | 100 | 7.85 | 7.75 |
| hsa-asg-7690 | hsa-asg-7690_st1 | 4.63 | 4.98 | 4.39 | 4.67 | 0.30 | 100 | 5.39 | 5.36 |
| hsa-asg-7688 | hsa-asg-7688_st1 | 5.20 | 4.55 | 4.91 | 4.89 | 0.33 | 100 | 2.69 | 2.28 |
| hsa-asg-7684 | hsa-asg-7684_st2 | 2.10 | 2.05 | 1.90 | 2.02 | 0.11 | 0 | 7.45 | 4.80 |
| hsa-asg-7667 | hsa-asg-7667_st2 | 11.95 | 12.15 | 12.08 | 12.06 | 0.10 | 100 | 11.64 | 11.61 |
| hsa-asg-7651 | hsa-asg-7651_st2 | 10.12 | 10.22 | 10.13 | 10.16 | 0.06 | 100 | 9.67 | 9.69 |
| hsa-asg-7640 | hsa-asg-7640_st2 | 8.88 | 8.86 | 8.88 | 8.87 | 0.01 | 66.66 | 9.28 | 9.08 |
| hsa-asg-7637 | hsa-asg-7637_st2 | 7.85 | 6.50 | 6.88 | 7.08 | 0.70 | 100 | 4.79 | 2.18 |
| hsa-asg-7617 | hsa-asg-7617_st1 | 8.45 | 8.84 | 9.00 | 8.76 | 0.28 | 66.66 | 9.43 | 9.49 |
| hsa-asg-7585 | hsa-asg-7585_st2 | 5.48 | 6.15 | 5.47 | 5.70 | 0.39 | 100 | 7.13 | 7.03 |
| hsa-asg-7579 | hsa-asg-7579_st2 | 7.91 | 8.12 | 7.85 | 7.96 | 0.14 | 100 | 8.34 | 8.51 |
| hsa-asg-7564 | hsa-asg-7564_st1 | 8.13 | 6.67 | 7.67 | 7.49 | 0.75 | 100 | 6.56 | 6.55 |
| hsa-asg-7540 | hsa-asg-7540_st2 | 6.85 | 6.01 | 6.88 | 6.58 | 0.50 | 100 | 8.00 | 7.40 |
| hsa-asg-7532 | hsa-asg-7532_st2 | 6.57 | 6.99 | 6.70 | 6.76 | 0.22 | 100 | 4.95 | 5.08 |
| hsa-asg-7514 | hsa-asg-7514_st1 | 11.38 | 11.17 | 11.22 | 11.25 | 0.11 | 100 | 11.80 | 11.49 |
| hsa-asg-7510 | hsa-asg-7510_st1 | 11.54 | 11.08 | 10.87 | 11.16 | 0.34 | 100 | 10.73 | 10.69 |
| hsa-asg-7491 | hsa-asg-7491_st1 | 9.11 | 9.60 | 9.89 | 9.53 | 0.39 | 66.66 | 9.29 | 8.58 |
| hsa-asg-7487 | hsa-asg-7487_st1 | 7.04 | 7.95 | 8.11 | 7.70 | 0.58 | 100 | 7.29 | 6.18 |
| hsa-asg-7478 | hsa-asg-7478_st1 | 4.90 | 4.27 | 3.87 | 4.34 | 0.52 | 33.33 | 3.25 | 3.02 |
| hsa-asg-7471 | hsa-asg-7471_st1 | 4.97 | 6.46 | 5.56 | 5.66 | 0.75 | 66.66 | 3.57 | 4.92 |
| hsa-asg-7465 | hsa-asg-7465_st2 | 7.84 | 5.66 | 6.38 | 6.62 | 1.11 | 100 | 3.91 | 2.61 |
| hsa-asg-7463 | hsa-asg-7463_st1 | 8.24 | 7.96 | 7.64 | 7.95 | 0.30 | 66.66 | 6.88 | 7.47 |
| hsa-asg-7458 | hsa-asg-7458_st2 | 1.40 | 2.29 | 0.75 | 1.48 | 0.77 | 0 | 4.98 | 5.26 |
| hsa-asg-744 | hsa-asg-744_st1 | 12.32 | 12.78 | 12.29 | 12.46 | 0.27 | 100 | 11.93 | 11.68 |
| hsa-asg-7428 | hsa-asg-7428_st1 | 11.21 | 11.22 | 11.32 | 11.25 | 0.06 | 100 | 10.46 | 10.54 |
| hsa-asg-7426 | hsa-asg-7426_st1 | 9.82 | 9.66 | 9.94 | 9.81 | 0.14 | 100 | 8.87 | 9.32 |
| hsa-asg-7424 | hsa-asg-7424_st1 | 7.41 | 7.82 | 6.89 | 7.37 | 0.46 | 0 | 7.97 | 7.84 |
| hsa-asg-7423 | hsa-asg-7423_st2 | 4.27 | 3.68 | 6.27 | 4.74 | 1.36 | 33.33 | 2.08 | 2.18 |
| hsa-asg-7410 | hsa-asg-7410_st1 | 8.64 | 8.40 | 8.67 | 8.57 | 0.15 | 100 | 8.05 | 8.06 |
| hsa-asg-7400 | hsa-asg-7400_st1 | 12.21 | 12.30 | 11.90 | 12.14 | 0.21 | 100 | 11.21 | 11.24 |
| hsa-asg-7367 | hsa-asg-7367_st2 | 2.82 | 2.84 | 2.12 | 2.59 | 0.41 | 0 | 1.83 | 2.08 |
| hsa-asg-7363 | hsa-asg-7363_st1 | 4.31 | 3.93 | 3.87 | 4.03 | 0.24 | 33.33 | 2.85 | 1.62 |
| hsa-asg-7319 | hsa-asg-7319_st2 | 3.80 | 3.58 | 3.56 | 3.65 | 0.13 | 0 | 2.51 | 3.13 |
| hsa-asg-7314 | hsa-asg-7314_st2 | 4.63 | 2.84 | 2.65 | 3.38 | 1.09 | 0 | 4.47 | 6.01 |
| hsa-asg-7302 | hsa-asg-7302_st2 | 3.69 | 3.76 | 4.39 | 3.95 | 0.38 | 33.33 | 1.22 | 2.08 |
| hsa-asg-730 | hsa-asg-730_st1 | 9.76 | 9.98 | 9.94 | 9.89 | 0.12 | 100 | 10.62 | 10.34 |
| hsa-asg-7292 | hsa-asg-7292_st1 | 10.18 | 10.66 | 10.58 | 10.47 | 0.26 | 100 | 9.64 | 9.85 |
| hsa-asg-7281 | hsa-asg-7281_st1 | 4.63 | 3.93 | 4.12 | 4.23 | 0.36 | 66.66 | 2.31 | 2.61 |
| hsa-asg-7258 | hsa-asg-7258_st2 | 3.32 | 2.84 | 5.76 | 3.97 | 1.57 | 0 | 6.68 | 6.92 |
| hsa-asg-7252 | hsa-asg-7252_st1 | 4.20 | 4.27 | 4.39 | 4.28 | 0.10 | 0 | 3.98 | 4.22 |
| hsa-asg-7239 | hsa-asg-7239_st2 | 4.74 | 4.21 | 4.73 | 4.56 | 0.31 | 66.66 | 2.99 | 2.76 |
| hsa-asg-723 | hsa-asg-723_st2 | 3.80 | 3.85 | 4.23 | 3.96 | 0.24 | 33.33 | 2.31 | 2.28 |
| hsa-asg-7224 | hsa-asg-7224_st2 | 9.31 | 9.34 | 9.25 | 9.30 | 0.04 | 100 | 8.84 | 8.63 |
| hsa-asg-7221 | hsa-asg-7221_st1 | 10.27 | 10.66 | 10.37 | 10.44 | 0.20 | 100 | 9.65 | 9.73 |
| hsa-asg-7217 | hsa-asg-7217_st2 | 11.48 | 11.67 | 11.51 | 11.56 | 0.10 | 100 | 11.17 | 11.01 |
| hsa-asg-7201 | hsa-asg-7201_st2 | 8.19 | 8.32 | 8.44 | 8.32 | 0.13 | 100 | 7.63 | 7.72 |
| hsa-asg-7200 | hsa-asg-7200_st2 | 10.15 | 10.32 | 10.36 | 10.28 | 0.11 | 100 | 9.85 | 10.00 |
| hsa-asg-7199 | hsa-asg-7199_st1 | 10.06 | 10.70 | 10.44 | 10.40 | 0.32 | 100 | 9.91 | 9.57 |
| hsa-asg-7175 | hsa-asg-7175_st1 | 13.26 | 13.36 | 13.06 | 13.23 | 0.15 | 100 | 13.82 | 13.45 |
| hsa-asg-7173 | hsa-asg-7173_st1 | 9.64 | 9.43 | 9.95 | 9.67 | 0.26 | 100 | 10.12 | 10.08 |
| hsa-asg-7097 | hsa-asg-7097_st2 | 11.72 | 11.80 | 11.68 | 11.74 | 0.06 | 100 | 11.39 | 11.37 |
| hsa-asg-7096 | hsa-asg-7096_st2 | 12.57 | 12.67 | 12.38 | 12.54 | 0.15 | 100 | 13.15 | 12.78 |
| hsa-asg-7070 | hsa-asg-7070_st1 | 9.38 | 8.90 | 9.52 | 9.27 | 0.32 | 100 | 9.66 | 9.78 |
| hsa-asg-7062 | hsa-asg-7062_st1 | 8.14 | 7.68 | 8.52 | 8.11 | 0.42 | 100 | 8.84 | 8.81 |
| hsa-asg-7025 | hsa-asg-7025_st1 | 11.26 | 11.37 | 11.05 | 11.23 | 0.16 | 100 | 10.64 | 10.14 |
| hsa-asg-7009 | hsa-asg-7009_st1 | 9.46 | 9.63 | 9.28 | 9.46 | 0.17 | 100 | 8.69 | 8.35 |
| hsa-asg-6926 | hsa-asg-6926_st2 | 5.90 | 5.05 | 4.65 | 5.20 | 0.64 | 66.66 | 3.75 | 3.83 |
| hsa-asg-6922 | hsa-asg-6922_st2 | 2.38 | 3.76 | 2.93 | 3.02 | 0.70 | 0 | 1.54 | 1.35 |
| hsa-asg-6910 | hsa-asg-6910_st2 | 9.93 | 10.06 | 10.21 | 10.07 | 0.14 | 100 | 7.44 | 8.78 |
| hsa-asg-6898 | hsa-asg-6898_st2 | 4.74 | 3.68 | 4.18 | 4.20 | 0.53 | 33.33 | 3.13 | 2.45 |
| hsa-asg-6883 | hsa-asg-6883_st1 | 5.38 | 5.09 | 3.56 | 4.68 | 0.98 | 66.66 | 2.08 | 2.45 |
| hsa-asg-6860 | hsa-asg-6860_st1 | 10.79 | 10.53 | 10.72 | 10.68 | 0.14 | 100 | 9.87 | 9.66 |
| hsa-asg-6856 | hsa-asg-6856_st2 | 4.85 | 4.55 | 4.53 | 4.64 | 0.18 | 33.33 | 4.30 | 3.83 |
| hsa-asg-6831 | hsa-asg-6831_st2 | 9.60 | 9.67 | 9.68 | 9.65 | 0.05 | 100 | 10.45 | 10.19 |
| hsa-asg-6823 | hsa-asg-6823_st1 | 8.06 | 8.04 | 8.60 | 8.23 | 0.32 | 100 | 6.83 | 7.02 |
| hsa-asg-682 | hsa-asg-682_st2 | 7.97 | 7.14 | 7.65 | 7.59 | 0.42 | 100 | 6.75 | 6.96 |
| hsa-asg-6782 | hsa-asg-6782_st1 | 6.98 | 7.08 | 7.20 | 7.09 | 0.11 | 100 | 6.18 | 6.95 |
| hsa-asg-6754 | hsa-asg-6754_st1 | 5.35 | 4.27 | 4.00 | 4.54 | 0.71 | 0 | 6.28 | 6.79 |
| hsa-asg-6733 | hsa-asg-6733_st2 | 4.85 | 4.94 | 4.77 | 4.85 | 0.09 | 100 | 4.24 | 2.76 |
| hsa-asg-6729 | hsa-asg-6729_st2 | 9.04 | 9.98 | 9.09 | 9.37 | 0.53 | 100 | 7.92 | 8.13 |
| hsa-asg-6728 | hsa-asg-6728_st2 | 9.83 | 10.07 | 10.10 | 10.00 | 0.15 | 100 | 11.24 | 10.59 |
| hsa-asg-6633 | hsa-asg-6633_st2 | 6.01 | 6.31 | 5.04 | 5.78 | 0.66 | 66.66 | 4.30 | 4.55 |
| hsa-asg-657 | hsa-asg-657_st1 | 8.99 | 8.56 | 9.59 | 9.05 | 0.52 | 66.66 | 7.40 | 8.08 |
| hsa-asg-6569 | hsa-asg-6569_st2 | 7.23 | 7.23 | 7.86 | 7.44 | 0.36 | 100 | 5.86 | 6.35 |
| hsa-asg-6532 | hsa-asg-6532_st1 | 4.38 | 4.90 | 3.94 | 4.41 | 0.48 | 66.66 | 3.13 | 3.02 |
| hsa-asg- | hsa-asg-6507_st2 | 11.52 | 11.48 | 11.35 | 11.45 | 0.09 | 100 | 12.50 | 12.26 |
| 6507_st2 | | | | | | | | | |
| hsa-asg-6500 | hsa-asg-6500_st1 | 8.77 | 8.25 | 8.77 | 8.60 | 0.30 | 100 | 8.14 | 7.90 |
| hsa-asg-6466 | hsa-asg-6466_st1 | 11.71 | 11.74 | 11.69 | 11.71 | 0.03 | 100 | 12.19 | 11.79 |
| hsa-asg-644 | hsa-asg-644_st1 | 7.94 | 8.26 | 6.70 | 7.63 | 0.83 | 100 | 4.71 | 6.35 |
| hsa-asg-6412 | hsa-asg-6412_st2 | 8.89 | 9.24 | 9.65 | 9.26 | 0.38 | 66.66 | 7.71 | 8.92 |
| hsa-asg-641 | hsa-asg-641_st2 | 3.69 | 2.99 | 4.12 | 3.60 | 0.57 | 0 | 1.54 | 2.28 |
| hsa-asg-6383 | hsa-asg-6383_st1 | 8.83 | 9.49 | 9.55 | 9.29 | 0.40 | 66.66 | 8.24 | 8.41 |
| hsa-asg-6371 | hsa-asg-6371_st2 | 11.07 | 11.44 | 11.31 | 11.27 | 0.19 | 100 | 10.94 | 10.82 |
| hsa-asg-6341 | hsa-asg-6341_st2 | 12.94 | 12.85 | 12.58 | 12.79 | 0.18 | 100 | 13.74 | 13.55 |
| hsa-asg-6331 | hsa-asg-6331_st2 | 8.47 | 8.70 | 8.75 | 8.64 | 0.15 | 100 | 8.15 | 8.30 |
| hsa-asg-6239 | hsa-asg-6239_st2 | 2.82 | 3.37 | 2.49 | 2.90 | 0.45 | 0 | 2.08 | 1.05 |
| hsa-asg-6203 | hsa-asg-6203_st2 | 10.83 | 10.99 | 11.14 | 10.99 | 0.16 | 100 | 11.92 | 11.58 |
| hsa-asg-6202 | hsa-asg-6202_st2 | 8.80 | 8.64 | 8.44 | 8.63 | 0.18 | 100 | 7.99 | 7.85 |
| hsa-asg-6186 | hsa-asg-6186_st2 | 5.89 | 5.19 | 7.01 | 6.03 | 0.92 | 66.66 | 4.24 | 3.93 |
| hsa-asg-6180 | hsa-asg-6180_st1 | 11.75 | 11.82 | 11.74 | 11.77 | 0.05 | 100 | 11.38 | 10.91 |
| hsa-asg-6168 | hsa-asg-6168_st1 | 1.78 | 2.05 | 1.90 | 1.91 | 0.14 | 0 | 2.69 | 2.76 |
| hsa-asg-6165 | hsa-asg-6165_st2 | 1.40 | 2.99 | 3.06 | 2.49 | 0.94 | 0 | 4.57 | 4.35 |
| hsa-asg-6149 | hsa-asg-6149_st2 | 10.50 | 10.69 | 10.52 | 10.57 | 0.11 | 100 | 9.82 | 9.66 |
| hsa-asg-6138 | hsa-asg-6138_st1 | 7.09 | 8.06 | 8.17 | 7.77 | 0.60 | 100 | 3.91 | 5.02 |
| hsa-asg-6116 | hsa-asg-6116_st2 | 1.78 | 1.79 | 1.90 | 1.82 | 0.07 | 0 | 2.85 | 3.34 |
| hsa-asg-6092 | hsa-asg-6092_st2 | 11.53 | 11.37 | 11.49 | 11.46 | 0.09 | 66.66 | 12.21 | 12.04 |
| hsa-asg-6071 | hsa-asg-6071_st2 | 4.99 | 5.40 | 5.84 | 5.41 | 0.42 | 0 | 6.69 | 6.80 |
| hsa-asg-6021 | hsa-asg-6021_st2 | 9.84 | 9.55 | 9.83 | 9.74 | 0.16 | 100 | 9.46 | 9.50 |
| hsa-asg-6019 | hsa-asg-6019_st1 | 6.63 | 7.21 | 6.20 | 6.68 | 0.51 | 0 | 8.56 | 7.98 |
| hsa-asg-6018 | hsa-asg-6018_st2 | 9.25 | 9.15 | 10.01 | 9.47 | 0.47 | 100 | 10.35 | 10.32 |
| hsa-asg-6000 | hsa-asg-6000_st1 | 8.39 | 8.49 | 8.11 | 8.33 | 0.19 | 33.33 | 7.83 | 6.81 |
| hsa-asg-5960 | hsa-asg-5960_st2 | 11.11 | 11.54 | 11.05 | 11.23 | 0.26 | 100 | 10.35 | 10.26 |
| hsa-asg-5952 | hsa-asg-5952_st2 | 5.97 | 6.36 | 5.40 | 5.91 | 0.49 | 66.66 | 4.18 | 4.17 |
| hsa-asg-5889 | hsa-asg-5889_st2 | 7.62 | 7.59 | 7.80 | 7.67 | 0.11 | 100 | 4.05 | 5.71 |
| hsa-asg-5873 | hsa-asg-5873_st2 | 5.55 | 5.02 | 4.53 | 5.03 | 0.51 | 100 | 2.51 | 3.83 |
| hsa-asg-585 | hsa-asg-585_st2 | 12.45 | 12.36 | 12.14 | 12.32 | 0.16 | 100 | 12.81 | 12.56 |
| hsa-asg-5827 | hsa-asg-5827_st2 | 7.85 | 7.43 | 7.12 | 7.47 | 0.37 | 100 | 3.57 | 4.59 |
| hsa-asg-5810 | hsa-asg-5810_st2 | 9.99 | 9.79 | 9.49 | 9.76 | 0.25 | 100 | 10.08 | 10.10 |
| hsa-asg-5773 | hsa-asg-5773_st2 | 7.70 | 8.93 | 8.21 | 8.28 | 0.62 | 33.33 | 6.91 | 6.65 |
| hsa-asg-5728 | hsa-asg-5728_st2 | 10.73 | 11.32 | 11.13 | 11.06 | 0.30 | 100 | 9.14 | 9.99 |
| hsa-asg-572 | hsa-asg-572_st2 | 8.06 | 9.67 | 8.85 | 8.86 | 0.81 | 66.66 | 7.61 | 7.14 |
| hsa-asg-5695 | hsa-asg-5695_st2 | 3.90 | 4.14 | 4.84 | 4.29 | 0.49 | 33.33 | 2.69 | 2.76 |
| hsa-asg-562 | hsa-asg-562_st1 | 10.65 | 9.06 | 9.79 | 9.84 | 0.80 | 100 | 8.07 | 6.86 |
| hsa-asg-5519 | hsa-asg-5519_st1 | 4.63 | 5.07 | 5.85 | 5.19 | 0.62 | 0 | 6.79 | 7.19 |
| hsa-asg-5511 | hsa-asg-5511_st2 | 7.82 | 8.13 | 9.18 | 8.38 | 0.71 | 100 | 7.05 | 7.77 |
| hsa-asg-547 | hsa-asg-547_st1 | 2.61 | 2.49 | 2.49 | 2.53 | 0.07 | 0 | 1.54 | 2.08 |
| hsa-asg-5467 | hsa-asg-5467_st1 | 3.00 | 2.84 | 3.06 | 2.97 | 0.11 | 0 | 4.24 | 3.96 |
| hsa-asg-5451 | hsa-asg-5451_st2 | 5.75 | 5.16 | 5.40 | 5.43 | 0.30 | 100 | 2.69 | 3.68 |
| hsa-asg-5421 | hsa-asg-5421_st1 | 8.23 | 8.49 | 8.11 | 8.28 | 0.19 | 100 | 7.08 | 7.59 |
| hsa-asg-5399 | hsa-asg-5399_st1 | 7.31 | 8.69 | 9.30 | 8.43 | 1.02 | 66.66 | 10.21 | 10.46 |
| hsa-asg-5365 | hsa-asg-5365_st2 | 4.08 | 5.51 | 3.72 | 4.43 | 0.95 | 0 | 5.52 | 6.37 |
| hsa-asg-5326 | hsa-asg-5326_st2 | 6.93 | 6.16 | 5.68 | 6.26 | 0.63 | 66.66 | 8.20 | 7.96 |
| hsa-asg-5304 | hsa-asg-5304_st1 | 9.42 | 8.41 | 8.91 | 8.91 | 0.51 | 33.33 | 7.21 | 7.06 |
| hsa-asg-5290 | hsa-asg-5290_st2 | 3.00 | 3.48 | 2.65 | 3.05 | 0.42 | 0 | 5.31 | 4.77 |
| hsa-asg-529 | hsa-asg-529_st1 | 1.40 | 2.29 | 2.12 | 1.94 | 0.47 | 0 | 4.83 | 3.68 |
| hsa-asg-5289 | hsa-asg-5289_st2 | 8.95 | 9.13 | 9.22 | 9.10 | 0.14 | 66.66 | 9.32 | 9.79 |
| hsa-asg-5240 | hsa-asg-5240_st1 | 4.16 | 4.21 | 4.00 | 4.12 | 0.11 | 100 | 3.36 | 3.60 |
| hsa-asg-5227 | hsa-asg-5227_st1 | 5.01 | 6.16 | 5.68 | 5.62 | 0.58 | 66.66 | 5.16 | 4.22 |
| hsa-asg-5176 | hsa-asg-5176_st2 | 5.37 | 5.09 | 5.97 | 5.48 | 0.45 | 33.33 | 2.69 | 3.64 |
| hsa-asg-5134 | hsa-asg-5134_st2 | 3.32 | 4.69 | 3.38 | 3.79 | 0.78 | 33.33 | 2.85 | 2.08 |
| hsa-asg-5122 | hsa-asg-5122_st2 | 10.19 | 11.33 | 10.77 | 10.76 | 0.57 | 100 | 9.39 | 9.12 |
| hsa-asg-5115 | hsa-asg-5115_st1 | 10.96 | 10.97 | 10.98 | 10.97 | 0.01 | 100 | 9.53 | 10.17 |
| hsa-asg-5109 | hsa-asg-5109_st1 | 11.62 | 12.01 | 11.75 | 11.79 | 0.20 | 100 | 11.13 | 11.36 |
| hsa-asg-509 | hsa-asg-509_st1 | 2.38 | 2.49 | 2.12 | 2.33 | 0.19 | 0 | 4.87 | 3.68 |
| hsa-asg-5085 | hsa-asg-5085_st2 | 10.83 | 11.14 | 10.68 | 10.88 | 0.24 | 100 | 10.56 | 10.39 |
| hsa-asg-5061 | hsa-asg-5061_st1 | 8.76 | 8.76 | 9.43 | 8.98 | 0.39 | 100 | 10.07 | 9.53 |
| hsa-asg-5053 | hsa-asg-5053_st1 | 4.85 | 4.44 | 4.57 | 4.62 | 0.21 | 66.66 | 4.05 | 3.13 |
| hsa-asg-5005 | hsa-asg-5005_st2 | 9.30 | 9.55 | 9.35 | 9.40 | 0.13 | 100 | 8.69 | 7.96 |
| hsa-asg-5000 | hsa-asg-5000_st2 | 6.96 | 6.88 | 6.86 | 6.90 | 0.06 | 100 | 5.06 | 6.65 |
| hsa-asg-4990 | hsa-asg-4990_st2 | 10.28 | 10.69 | 10.17 | 10.38 | 0.27 | 100 | 8.86 | 9.24 |
| hsa-asg-4971 | hsa-asg-4971_st1 | 9.99 | 10.19 | 9.78 | 9.99 | 0.21 | 100 | 9.58 | 9.34 |
| hsa-asg-4914 | hsa-asg-4914_st1 | 4.08 | 2.68 | 4.98 | 3.91 | 1.16 | 33.33 | 1.22 | 1.05 |
| hsa-asg-4912 | hsa-asg-4912_st2 | 11.30 | 11.21 | 11.31 | 11.27 | 0.05 | 100 | 10.43 | 10.45 |
| hsa-asg-4892 | hsa-asg-4892_st2 | 3.99 | 4.14 | 3.87 | 4.00 | 0.14 | 0 | 3.75 | 3.52 |
| hsa-asg-4854 | hsa-asg-4854_st2 | 8.29 | 8.18 | 7.83 | 8.10 | 0.24 | 100 | 9.21 | 9.07 |
| hsa-asg-4847 | hsa-asg-4847_st1 | 9.84 | 10.08 | 9.90 | 9.94 | 0.12 | 100 | 9.36 | 9.37 |
| hsa-asg-4844 | hsa-asg-4844_st2 | 8.88 | 9.58 | 9.52 | 9.33 | 0.39 | 100 | 9.97 | 9.65 |
| hsa-asg-4840 | hsa-asg-4840_st1 | 6.78 | 5.40 | 5.58 | 5.92 | 0.75 | 100 | 3.75 | 3.24 |
| hsa-asg-4839 | hsa-asg-4839_st2 | 12.31 | 12.57 | 12.35 | 12.41 | 0.14 | 100 | 12.91 | 12.63 |
| hsa-asg-481 | hsa-asg-481_st1 | 5.28 | 3.76 | 3.06 | 4.03 | 1.13 | 33.33 | 1.83 | 1.86 |
| hsa-asg-4722 | hsa-asg-4722_st1 | 6.48 | 6.46 | 6.96 | 6.64 | 0.29 | 0 | 7.71 | 7.92 |
| hsa-asg-471 | hsa-asg-471_st1 | 10.07 | 10.26 | 10.11 | 10.15 | 0.10 | 100 | 10.77 | 10.72 |
| hsa-asg-4703 | hsa-asg-4703_st2 | 5.64 | 6.90 | 6.73 | 6.42 | 0.68 | 100 | 8.16 | 7.55 |
| hsa-asg-47 | hsa-asg-47_st1 | 11.40 | 11.40 | 10.93 | 11.24 | 0.27 | 100 | 10.46 | 10.71 |
| hsa-asg-468 | hsa-asg-468_st1 | 9.55 | 9.98 | 9.40 | 9.64 | 0.30 | 100 | 8.10 | 8.52 |
| hsa-asg-4654 | hsa-asg-4654_st1 | 11.98 | 12.08 | 12.01 | 12.02 | 0.05 | 100 | 12.33 | 12.19 |
| hsa-asg-4618 | hsa-asg-4618_st1 | 6.20 | 5.77 | 5.40 | 5.79 | 0.40 | 66.66 | 7.23 | 7.11 |
| hsa-asg-459 | hsa-asg-459_st1 | 11.70 | 11.76 | 11.86 | 11.77 | 0.08 | 100 | 12.45 | 12.28 |
| hsa-asg-4580 | hsa-asg-4580_st2 | 5.20 | 5.05 | 5.42 | 5.23 | 0.19 | 0 | 6.30 | 6.57 |
| hsa-asg-458 | hsa-asg-458_st1 | 7.46 | 7.31 | 7.86 | 7.54 | 0.28 | 0 | 9.51 | 10.08 |
| hsa-asg-4529 | hsa-asg-4529_st1 | 10.96 | 11.46 | 10.78 | 11.07 | 0.36 | 100 | 10.29 | 9.81 |
| hsa-asg-4469 | hsa-asg-4469_st1 | 9.65 | 9.87 | 9.73 | 9.75 | 0.11 | 100 | 8.24 | 8.65 |
| hsa-asg-4458 | hsa-asg-4458_st1 | 9.13 | 9.19 | 8.58 | 8.97 | 0.34 | 100 | 7.08 | 7.93 |
| hsa-asg-4448 | hsa-asg-4448_st1 | 4.16 | 4.14 | 4.61 | 4.30 | 0.27 | 33.33 | 2.08 | 3.02 |
| hsa-asg-430 | hsa-asg-430_st1 | 2.10 | 1.48 | 1.65 | 1.74 | 0.32 | 0 | 5.06 | 4.49 |
| hsa-asg-4262 | hsa-asg-4262_st1 | 8.80 | 8.32 | 8.58 | 8.56 | 0.24 | 100 | 7.55 | 8.37 |
| hsa-asg-425 | hsa-asg-425_st2 | 10.24 | 10.38 | 9.28 | 9.97 | 0.60 | 100 | 8.16 | 7.94 |
| hsa-asg-4236 | hsa-asg-4236_st1 | 4.80 | 4.07 | 4.91 | 4.59 | 0.46 | 66.66 | 3.25 | 3.52 |
| hsa-asg-4223 | hsa-asg-4223_st2 | 12.63 | 12.46 | 12.66 | 12.58 | 0.10 | 100 | 11.88 | 11.86 |
| hsa-asg-4222 | hsa-asg-4222_st2 | 9.28 | 9.84 | 9.14 | 9.42 | 0.37 | 100 | 6.97 | 8.03 |
| hsa-asg-4209 | hsa-asg-4209_st2 | 10.21 | 10.68 | 10.42 | 10.44 | 0.24 | 100 | 9.61 | 9.38 |
| hsa-asg-4199 | hsa-asg-4199_st1 | 7.62 | 7.71 | 8.10 | 7.81 | 0.26 | 100 | 7.42 | 7.29 |
| hsa-asg-4172 | hsa-asg-4172_st2 | 5.12 | 4.39 | 4.91 | 4.81 | 0.38 | 100 | 3.13 | 3.13 |
| hsa-asg-4146 | hsa-asg-4146_st2 | 9.38 | 9.89 | 9.12 | 9.46 | 0.39 | 100 | 8.80 | 8.73 |
| hsa-asg-4122 | hsa-asg-4122_st2 | 5.04 | 3.68 | 4.65 | 4.46 | 0.70 | 66.66 | 2.51 | 3.52 |
| hsa-asg-412 | hsa-asg-412_st1 | 9.74 | 9.95 | 9.69 | 9.79 | 0.14 | 100 | 9.66 | 9.43 |
| hsa-asg-4114 | hsa-asg-4114_st2 | 5.67 | 5.31 | 4.44 | 5.14 | 0.63 | 100 | 3.91 | 3.60 |
| hsa-asg-4075 | hsa-asg-4075_st1 | 4.69 | 2.68 | 3.47 | 3.61 | 1.01 | 33.33 | 2.08 | 2.45 |
| hsa-asg-4064 | hsa-asg-4064_st1 | 1.40 | 1.79 | 3.28 | 2.16 | 0.99 | 0 | 4.36 | 5.91 |
| hsa-asg-4061 | hsa-asg-4061_st1 | 10.38 | 10.70 | 10.12 | 10.40 | 0.29 | 100 | 9.47 | 9.55 |
| hsa-asg-4059 | hsa-asg-4059_st1 | 9.52 | 9.75 | 9.52 | 9.60 | 0.14 | 100 | 10.31 | 9.86 |
| hsa-asg-4057 | hsa-asg-4057_st1 | 2.38 | 2.05 | 2.49 | 2.31 | 0.23 | 0 | 1.83 | 1.86 |
| hsa-asg-4045 | hsa-asg-4045_st1 | 3.39 | 4.00 | 3.80 | 3.73 | 0.31 | 0 | 5.93 | 5.02 |
| hsa-asg-4023 | hsa-asg-4023_st2 | 8.67 | 8.59 | 9.30 | 8.86 | 0.39 | 66.66 | 9.63 | 9.64 |
| hsa-asg-4019 | hsa-asg-4019_st1 | 7.34 | 7.47 | 7.37 | 7.39 | 0.07 | 100 | 6.98 | 7.12 |
| hsa-asg-4005 | hsa-asg-4005_st2 | 6.65 | 6.01 | 7.05 | 6.57 | 0.53 | 100 | 7.50 | 8.02 |
| hsa-asg-4002 | hsa-asg-4002_st1 | 9.44 | 8.91 | 8.61 | 8.99 | 0.42 | 100 | 7.79 | 7.96 |
| hsa-asg-3999 | hsa-asg-3999_st1 | 11.25 | 11.46 | 11.09 | 11.27 | 0.18 | 100 | 10.74 | 10.86 |
| hsa-asg-3988 | hsa-asg-3988_st2 | 9.18 | 9.04 | 9.12 | 9.11 | 0.07 | 100 | 8.75 | 8.80 |
| hsa-asg-3983 | hsa-asg-3983_st1 | 11.29 | 12.10 | 11.41 | 11.60 | 0.44 | 100 | 10.34 | 10.13 |
| hsa-asg-3977 | hsa-asg-3977_st2 | 6.37 | 6.13 | 6.37 | 6.29 | 0.14 | 100 | 3.66 | 5.03 |
| hsa-asg-3970 | hsa-asg-3970_st2 | 6.95 | 5.66 | 6.59 | 6.40 | 0.67 | 100 | 4.36 | 4.57 |
| hsa-asg-395 | hsa-asg-395_st2 | 9.38 | 9.26 | 9.19 | 9.28 | 0.09 | 100 | 9.90 | 10.05 |
| hsa-asg-3941 | hsa-asg-3941_st2 | 10.20 | 10.91 | 10.15 | 10.42 | 0.43 | 100 | 9.34 | 9.22 |
| hsa-asg-3915 | hsa-asg-3915_st1 | 10.89 | 10.76 | 10.75 | 10.80 | 0.08 | 100 | 10.57 | 10.55 |
| hsa-asg-3910 | hsa-asg-3910_st2 | 4.90 | 4.98 | 6.53 | 5.47 | 0.92 | 33.33 | 1.22 | 1.97 |
| hsa-asg-3882 | hsa-asg-3882_st1 | 6.16 | 6.24 | 6.23 | 6.21 | 0.04 | 100 | 4.91 | 5.93 |
| hsa-asg-3854 | hsa-asg-3854_st1 | 4.99 | 4.60 | 5.04 | 4.88 | 0.24 | 100 | 2.51 | 1.05 |
| hsa-asg-3842 | hsa-asg-3842_st1 | 4.85 | 4.33 | 2.80 | 3.99 | 1.06 | 33.33 | 2.69 | 2.28 |
| hsa-asg-3822 | hsa-asg-3822_st2 | 4.31 | 4.33 | 6.29 | 4.98 | 1.14 | 33.33 | 2.69 | 3.47 |
| hsa-asg-3807 | hsa-asg-3807_st1 | 4.69 | 3.68 | 6.23 | 4.86 | 1.28 | 66.66 | 2.85 | 2.76 |
| hsa-asg-3786 | hsa-asg-3786_st2 | 8.52 | 8.27 | 8.38 | 8.39 | 0.13 | 100 | 8.50 | 9.00 |
| hsa-asg-3777 | hsa-asg-3777_st2 | 8.05 | 7.97 | 8.39 | 8.14 | 0.22 | 33.33 | 9.34 | 8.77 |
| hsa-asg-377 | hsa-asg-377_st2 | 11.96 | 12.35 | 11.94 | 12.08 | 0.23 | 100 | 11.65 | 11.55 |
| hsa-asg-3722 | hsa-asg-3722_st1 | 10.92 | 11.60 | 11.04 | 11.19 | 0.36 | 100 | 9.77 | 10.24 |
| hsa-asg-3715 | hsa-asg-3715_st1 | 9.64 | 9.32 | 9.67 | 9.54 | 0.19 | 33.33 | 10.24 | 10.50 |
| hsa-asg-3714 | hsa-asg-3714_st1 | 7.27 | 7.44 | 6.91 | 7.21 | 0.27 | 100 | 7.97 | 8.02 |
| hsa-asg-3694 | hsa-asg-3694_st1 | 7.31 | 7.88 | 8.16 | 7.78 | 0.43 | 0 | 8.76 | 8.50 |
| hsa-asg-3654 | hsa-asg-3654_st1 | 8.60 | 8.82 | 8.66 | 8.69 | 0.11 | 66.66 | 6.42 | 7.42 |
| hsa-asg-3637 | hsa-asg-3637_st1 | 11.38 | 11.37 | 11.63 | 11.46 | 0.15 | 100 | 11.08 | 10.72 |
| hsa-asg-3551 | hsa-asg-3551_st1 | 4.69 | 4.27 | 4.77 | 4.58 | 0.27 | 66.66 | 2.51 | 3.96 |
| hsa-asg-355 | hsa-asg-355_st1 | 4.31 | 4.00 | 4.18 | 4.16 | 0.15 | 33.33 | 3.13 | 2.89 |
| hsa-asg-3516 | hsa-asg-3516_st1 | 3.80 | 3.13 | 3.80 | 3.57 | 0.38 | 0 | 4.71 | 4.35 |
| hsa-asg-3513 | hsa-asg-3513_st1 | 4.38 | 4.14 | 4.44 | 4.32 | 0.16 | 66.66 | 3.57 | 3.02 |
| hsa-asg-3464 | hsa-asg-3464_st2 | 13.22 | 13.23 | 13.24 | 13.23 | 0.01 | 100 | 13.88 | 13.71 |
| hsa-asg-3462 | hsa-asg-3462_st2 | 11.68 | 11.58 | 11.53 | 11.59 | 0.08 | 100 | 12.42 | 12.22 |
| hsa-asg-3383 | hsa-asg-3383_st1 | 12.14 | 12.43 | 12.45 | 12.34 | 0.18 | 100 | 11.74 | 11.84 |
| hsa-asg-3360 | hsa-asg-3360_st2 | 8.17 | 8.02 | 7.95 | 8.05 | 0.12 | 100 | 7.57 | 7.44 |
| hsa-asg-3345 | hsa-asg-3345_st1 | 11.91 | 12.34 | 12.05 | 12.10 | 0.22 | 100 | 11.70 | 11.43 |
| hsa-asg-3296 | hsa-asg-3296_st1 | 5.10 | 5.51 | 5.84 | 5.48 | 0.37 | 33.33 | 3.98 | 4.92 |
| hsa-asg-3291 | hsa-asg-3291_st2 | 7.68 | 7.60 | 7.91 | 7.73 | 0.16 | 0 | 8.82 | 8.30 |
| hsa-asg-3290 | hsa-asg-3290_st1 | 9.71 | 9.57 | 9.71 | 9.66 | 0.08 | 100 | 9.36 | 9.13 |
| hsa-asg-3278 | hsa-asg-3278_st1 | 10.38 | 10.02 | 10.44 | 10.28 | 0.22 | 100 | 8.33 | 8.38 |
| hsa-asg-3271 | hsa-asg-3271_st1 | 10.19 | 10.33 | 10.30 | 10.27 | 0.07 | 100 | 11.26 | 10.97 |
| hsa-asg-3265 | hsa-asg-3265_st1 | 7.10 | 7.75 | 7.99 | 7.61 | 0.46 | 100 | 3.98 | 6.41 |
| hsa-asg-3231 | hsa-asg-3231_st2 | 12.91 | 13.28 | 12.83 | 13.00 | 0.24 | 100 | 12.28 | 12.30 |
| hsa-asg-32 | hsa-asg-32_st2 | 7.05 | 7.22 | 7.05 | 7.10 | 0.10 | 100 | 7.59 | 8.07 |
| hsa-asg-3199 | hsa-asg-3199_st1 | 6.49 | 7.07 | 7.39 | 6.98 | 0.46 | 100 | 5.67 | 5.55 |
| hsa-asg-3186 | hsa-asg-3186_st2 | 11.88 | 11.72 | 11.81 | 11.80 | 0.08 | 100 | 11.58 | 11.62 |
| hsa-asg-3182 | hsa-asg-3182_st1 | 9.28 | 9.76 | 9.80 | 9.61 | 0.29 | 100 | 8.46 | 7.90 |
| hsa-asg-3156 | hsa-asg-3156_st1 | 8.17 | 9.19 | 7.76 | 8.37 | 0.73 | 100 | 6.59 | 6.93 |
| hsa-asg-3130 | hsa-asg-3130_st1 | 11.67 | 11.42 | 11.63 | 11.57 | 0.13 | 100 | 12.13 | 11.73 |
| hsa-asg-3124 | hsa-asg-3124_st2 | 4.74 | 5.58 | 4.34 | 4.89 | 0.63 | 66.66 | 1.22 | 2.28 |
| hsa-asg-3112 | hsa-asg-3112_st1 | 8.75 | 8.35 | 8.51 | 8.54 | 0.20 | 100 | 9.58 | 9.35 |
| hsa-asg-3101 | hsa-asg-3101_st2 | 9.49 | 9.86 | 9.08 | 9.48 | 0.39 | 100 | 8.65 | 8.70 |
| hsa-asg-3073 | hsa-asg-3073_st2 | 8.71 | 7.99 | 7.84 | 8.18 | 0.46 | 100 | 9.37 | 9.44 |
| hsa-asg-3070 | hsa-asg-3070_st2 | 4.87 | 5.37 | 4.91 | 5.05 | 0.28 | 0 | 2.08 | 2.96 |
| hsa-asg-3046 | hsa-asg-3046_st2 | 10.48 | 9.72 | 10.11 | 10.10 | 0.38 | 100 | 9.42 | 9.36 |
| hsa-asg-3038 | hsa-asg-3038_st2 | 5.28 | 5.56 | 5.30 | 5.38 | 0.16 | 0 | 5.12 | 4.95 |
| hsa-asg-3015 | hsa-asg-3015_st1 | 1.78 | 1.48 | 2.93 | 2.07 | 0.77 | 0 | 6.74 | 3.24 |
| hsa-asg-3013 | hsa-asg-3013_st1 | 6.70 | 6.47 | 6.71 | 6.62 | 0.14 | 0 | 7.08 | 7.21 |
| hsa-asg-2981 | hsa-asg-2981_st2 | 5.12 | 5.09 | 4.98 | 5.06 | 0.07 | 100 | 4.71 | 4.49 |
| hsa-asg-2966 | hsa-asg-2966_st2 | 8.93 | 8.32 | 9.29 | 8.85 | 0.49 | 0 | 7.90 | 7.92 |
| hsa-asg-2952 | hsa-asg-2952_st1 | 3.69 | 3.68 | 4.44 | 3.93 | 0.43 | 33.33 | 3.13 | 2.45 |
| hsa-asg-2940 | hsa-asg-2940_st1 | 4.97 | 4.98 | 4.53 | 4.82 | 0.26 | 0 | 3.91 | 3.79 |
| hsa-asg-2930 | hsa-asg-2930_st1 | 4.74 | 4.86 | 4.12 | 4.58 | 0.40 | 33.33 | 2.51 | 2.08 |
| hsa-asg-2924 | hsa-asg-2924_st1 | 6.46 | 5.75 | 6.33 | 6.18 | 0.38 | 100 | 1.83 | 2.76 |
| hsa-asg-2899 | hsa-asg-2899_st2 | 12.75 | 12.82 | 12.51 | 12.69 | 0.16 | 100 | 13.15 | 12.95 |
| hsa-asg-2872 | hsa-asg-2872_st2 | 12.28 | 11.98 | 12.43 | 12.23 | 0.23 | 100 | 11.86 | 11.59 |
| hsa-asg-2862 | hsa-asg-2862_st1 | 10.12 | 10.53 | 10.25 | 10.30 | 0.21 | 100 | 9.72 | 9.71 |
| hsa-asg-2858 | hsa-asg-2858_st1 | 9.64 | 9.87 | 10.11 | 9.87 | 0.24 | 100 | 9.68 | 9.56 |
| hsa-asg-2856 | hsa-asg-2856_st1 | 12.06 | 12.17 | 11.82 | 12.01 | 0.18 | 100 | 10.38 | 10.39 |
| hsa-asg-2855 | hsa-asg-2855_st2 | 4.08 | 3.37 | 3.87 | 3.77 | 0.36 | 0 | 2.51 | 2.61 |
| hsa-asg-2843 | hsa-asg-2843_st1 | 3.69 | 3.13 | 3.47 | 3.43 | 0.28 | 0 | 2.85 | 2.28 |
| hsa-asg-2660 | hsa-asg-2660_st1 | 6.29 | 3.76 | 5.54 | 5.20 | 1.30 | 66.66 | 10.00 | 9.02 |
| hsa-asg-265 | hsa-asg-265_st2 | 9.13 | 8.98 | 9.04 | 9.05 | 0.08 | 100 | 9.55 | 9.20 |
| hsa-asg-2620 | hsa-asg-2620_st1 | 5.12 | 5.34 | 4.95 | 5.14 | 0.20 | 100 | 2.85 | 3.34 |
| hsa-asg-2588 | hsa-asg-2588_st1 | 10.17 | 10.20 | 10.57 | 10.31 | 0.22 | 100 | 9.94 | 9.72 |
| hsa-asg-2580 | hsa-asg-2580_st1 | 11.90 | 12.23 | 12.21 | 12.11 | 0.18 | 100 | 11.65 | 11.38 |
| hsa-asg-257 | hsa-asg-257_st2 | 3.45 | 4.55 | 4.18 | 4.06 | 0.56 | 66.66 | 3.25 | 2.89 |
| hsa-asg-2565 | hsa-asg-2565_st2 | 5.83 | 6.39 | 4.65 | 5.62 | 0.89 | 100 | 2.99 | 2.45 |
| hsa-asg-2563 | hsa-asg-2563_st2 | 9.34 | 9.70 | 9.56 | 9.53 | 0.18 | 100 | 8.80 | 8.96 |
| hsa-asg-2542 | hsa-asg-2542_st1 | 7.06 | 6.01 | 6.62 | 6.56 | 0.53 | 0 | 9.62 | 8.31 |
| hsa-asg-2541 | hsa-asg-2541_st1 | 8.80 | 9.61 | 9.27 | 9.23 | 0.41 | 66.66 | 8.61 | 8.91 |
| hsa-asg-2473 | hsa-asg-2473_st1 | 6.06 | 5.99 | 5.62 | 5.89 | 0.23 | 100 | 7.67 | 7.37 |
| hsa-asg-247 | hsa-asg-247_st1 | 8.88 | 9.05 | 8.98 | 8.97 | 0.08 | 100 | 8.44 | 8.47 |
| hsa-asg-2459 | hsa-asg-2459_st1 | 3.99 | 2.99 | 5.13 | 4.04 | 1.07 | 33.33 | 2.08 | 2.89 |
| hsa-asg-2449 | hsa-asg-2449_st1 | 2.10 | 2.68 | 2.93 | 2.57 | 0.43 | 0 | 7.65 | 4.55 |
| hsa-asg-2437 | hsa-asg-2437_st1 | 8.43 | 8.48 | 8.37 | 8.43 | 0.06 | 100 | 8.20 | 8.23 |
| hsa-asg-2433 | hsa-asg-2433_st2 | 3.32 | 2.99 | 3.80 | 3.37 | 0.40 | 0 | 4.12 | 4.49 |
| hsa-asg-2401 | hsa-asg-2401_st2 | 9.94 | 9.85 | 9.43 | 9.74 | 0.27 | 100 | 9.50 | 9.28 |
| hsa-asg-2371 | hsa-asg-2371_st1 | 3.17 | 2.68 | 3.17 | 3.01 | 0.28 | 0 | 2.31 | 1.35 |
| hsa-asg-2365 | hsa-asg-2365_st1 | 4.80 | 5.19 | 6.00 | 5.33 | 0.62 | 33.33 | 2.85 | 1.48 |
| hsa-asg-2273 | hsa-asg-2273_st1 | 4.69 | 4.82 | 4.98 | 4.83 | 0.15 | 100 | 2.31 | 2.45 |
| hsa-asg-2267 | hsa-asg-2267_st2 | 8.33 | 8.74 | 8.48 | 8.52 | 0.20 | 100 | 8.78 | 9.54 |
| hsa-asg-2237 | hsa-asg-2237_st1 | 5.24 | 5.56 | 4.12 | 4.97 | 0.75 | 0 | 6.64 | 6.30 |
| hsa-asg-2228 | hsa-asg-2228_st1 | 10.84 | 11.20 | 10.79 | 10.95 | 0.22 | 100 | 9.85 | 9.98 |
| hsa-asg-2199 | hsa-asg-2199_st1 | 11.56 | 11.55 | 11.56 | 11.56 | 0.01 | 100 | 12.17 | 11.84 |
| hsa-asg-2195 | hsa-asg-2195_st1 | 11.69 | 11.76 | 11.62 | 11.69 | 0.07 | 100 | 12.41 | 11.96 |
| hsa-asg-2174 | hsa-asg-2174_st1 | 8.45 | 9.11 | 9.06 | 8.87 | 0.37 | 0 | 8.05 | 7.86 |
| hsa-asg-2160 | hsa-asg-2160_st1 | 7.79 | 8.03 | 7.75 | 7.86 | 0.16 | 100 | 8.36 | 7.98 |
| hsa-asg-2149 | hsa-asg-2149_st1 | 7.20 | 7.18 | 7.10 | 7.16 | 0.05 | 100 | 7.56 | 7.37 |
| hsa-asg-2138 | hsa-asg-2138_st2 | 9.84 | 9.13 | 9.34 | 9.44 | 0.37 | 33.33 | 9.09 | 8.68 |
| hsa-asg-2094 | hsa-asg-2094_st1 | 5.67 | 4.90 | 5.01 | 5.19 | 0.41 | 100 | 3.47 | 2.08 |
| hsa-asg-1981 | hsa-asg-1981_st1 | 7.19 | 8.94 | 7.17 | 7.77 | 1.02 | 100 | 5.55 | 5.71 |
| hsa-asg-1978 | hsa-asg-1978_st2 | 4.51 | 4.27 | 4.53 | 4.44 | 0.14 | 66.66 | 3.91 | 3.02 |
| hsa-asg-1941 | hsa-asg-1941_st2 | 3.00 | 2.49 | 3.06 | 2.85 | 0.31 | 0 | 3.36 | 3.52 |
| hsa-asg-1911 | hsa-asg-1911_st1 | 8.84 | 9.09 | 9.29 | 9.08 | 0.23 | 66.66 | 10.10 | 9.54 |
| hsa-asg-1888 | hsa-asg-1888_st1 | 10.59 | 10.94 | 10.91 | 10.81 | 0.20 | 100 | 10.39 | 9.90 |
| hsa-asg-1861 | hsa-asg-1861_st1 | 9.86 | 10.25 | 10.01 | 10.04 | 0.20 | 100 | 10.68 | 10.47 |
| hsa-asg-1858 | hsa-asg-1858_st1 | 12.77 | 13.03 | 12.51 | 12.77 | 0.26 | 100 | 11.81 | 11.88 |
| hsa-asg-1852 | hsa-asg-1852_st1 | 3.63 | 4.39 | 4.23 | 4.08 | 0.40 | 0 | 4.75 | 4.92 |
| hsa-asg-1838 | hsa-asg-1838_st2 | 6.69 | 5.37 | 6.94 | 6.33 | 0.84 | 66.66 | 5.02 | 5.19 |
| hsa-asg-1827 | hsa-asg-1827_st2 | 1.78 | 1.79 | 1.65 | 1.74 | 0.08 | 0 | 3.75 | 3.24 |
| hsa-asg-1813 | hsa-asg-1813_st2 | 10.95 | 10.93 | 11.27 | 11.05 | 0.19 | 100 | 11.63 | 11.51 |
| hsa-asg-1809 | hsa-asg-1809_st1 | 10.89 | 11.00 | 11.07 | 10.99 | 0.09 | 100 | 10.90 | 10.67 |
| hsa-asg-18 | hsa-asg-18_st1 | 7.73 | 7.24 | 7.83 | 7.60 | 0.31 | 0 | 8.58 | 8.14 |
| hsa-asg-1797 | hsa-asg-1797_st2 | 9.06 | 9.47 | 9.35 | 9.29 | 0.21 | 100 | 9.92 | 9.76 |
| hsa-asg-1775 | hsa-asg-1775_st2 | 9.11 | 9.36 | 9.51 | 9.33 | 0.20 | 100 | 10.28 | 9.83 |
| hsa-asg-1766 | hsa-asg-1766_st2 | 4.45 | 4.14 | 4.00 | 4.20 | 0.23 | 33.33 | 3.66 | 1.86 |
| hsa-asg-1755 | hsa-asg-1755_st2 | 4.45 | 5.61 | 4.34 | 4.80 | 0.70 | 66.66 | 2.69 | 1.62 |
| hsa-asg-1747 | hsa-asg-1747_st1 | 6.52 | 6.67 | 6.88 | 6.69 | 0.18 | 100 | 4.91 | 4.89 |
| hsa-asg-1736 | hsa-asg-1736_st1 | 10.68 | 10.97 | 10.97 | 10.87 | 0.17 | 100 | 10.13 | 9.33 |
| hsa-asg-1727 | hsa-asg-1727_st2 | 8.64 | 9.00 | 8.62 | 8.76 | 0.21 | 66.66 | 8.11 | 8.08 |
| hsa-asg-1726 | hsa-asg-1726_st1 | 10.34 | 10.62 | 10.28 | 10.41 | 0.19 | 100 | 11.09 | 10.94 |
| hsa-asg-1716 | hsa-asg-1716_st1 | 8.07 | 8.09 | 8.34 | 8.17 | 0.15 | 33.33 | 9.23 | 9.05 |
| hsa-asg-1699 | hsa-asg-1699_st2 | 10.35 | 10.55 | 10.73 | 10.54 | 0.19 | 100 | 9.92 | 9.80 |
| hsa-asg-1686 | hsa-asg-1686_st1 | 8.17 | 8.42 | 8.35 | 8.32 | 0.13 | 66.66 | 7.63 | 8.00 |
| hsa-asg-1641 | hsa-asg-1641_st1 | 9.17 | 10.23 | 9.95 | 9.78 | 0.55 | 100 | 8.99 | 8.87 |
| hsa-asg-1591 | hsa-asg-1591_st2 | 7.78 | 7.43 | 7.61 | 7.61 | 0.17 | 100 | 8.70 | 8.88 |
| hsa-asg-1588 | hsa-asg-1588_st1 | 6.63 | 6.15 | 6.20 | 6.32 | 0.26 | 100 | 4.30 | 5.92 |
| hsa-asg-1573 | hsa-asg-1573_st2 | 11.01 | 11.06 | 11.05 | 11.04 | 0.03 | 100 | 11.36 | 11.27 |
| hsa-asg-156 | hsa-asg-156_st2 | 7.27 | 7.08 | 6.51 | 6.96 | 0.40 | 100 | 6.22 | 6.62 |
| hsa-asg-1544 | hsa-asg-1544_st1 | 4.74 | 4.94 | 4.53 | 4.74 | 0.21 | 100 | 2.69 | 1.86 |
| hsa-asg-1534 | hsa-asg-1534_st1 | 3.32 | 3.37 | 4.39 | 3.69 | 0.60 | 33.33 | 1.83 | 1.86 |
| hsa-asg-1532 | hsa-asg-1532_st1 | 6.49 | 5.69 | 6.78 | 6.32 | 0.56 | 0 | 8.62 | 7.73 |
| hsa-asg-1519 | hsa-asg-1519_st1 | 6.26 | 6.72 | 6.66 | 6.55 | 0.25 | 100 | 5.69 | 1.86 |
| hsa-asg-1482 | hsa-asg-1482_st1 | 4.94 | 6.04 | 4.34 | 5.11 | 0.86 | 100 | 3.91 | 3.89 |
| hsa-asg-145 | hsa-asg-145_st2 | 10.76 | 11.62 | 10.99 | 11.12 | 0.44 | 100 | 10.19 | 10.04 |
| hsa-asg-1448 | hsa-asg-1448_st1 | 9.54 | 9.88 | 9.14 | 9.52 | 0.37 | 66.66 | 8.17 | 7.58 |
| hsa-asg-14242 | hsa-asg-14242_st2 | 5.30 | 5.79 | 4.34 | 5.14 | 0.74 | 0 | 7.57 | 6.32 |
| hsa-asg-14237 | hsa-asg-14237_st2 | 9.94 | 9.45 | 9.62 | 9.67 | 0.25 | 100 | 9.20 | 8.77 |
| hsa-asg-14233 | hsa-asg-14233_st1 | 9.21 | 9.66 | 9.82 | 9.56 | 0.32 | 100 | 7.62 | 7.03 |
| hsa-asg-14217 | hsa-asg-14217_st1 | 9.61 | 9.29 | 9.04 | 9.31 | 0.28 | 100 | 6.51 | 6.53 |
| hsa-asg-1420 | hsa-asg-1420_st2 | 10.17 | 10.61 | 10.62 | 10.47 | 0.26 | 100 | 9.18 | 8.97 |
| hsa-asg-14198 | hsa-asg-14198_st2 | 3.90 | 3.48 | 4.91 | 4.10 | 0.74 | 66.66 | 2.08 | 1.86 |
| hsa-asg-14197 | hsa-asg-14197_st1 | 13.05 | 13.07 | 12.86 | 12.99 | 0.12 | 100 | 13.46 | 13.23 |
| hsa-asg-14189 | hsa-asg-14189_st2 | 15.21 | 15.06 | 14.80 | 15.02 | 0.21 | 100 | 14.60 | 14.43 |
| hsa-asg-14176 | hsa-asg-14176_st1 | 8.31 | 8.40 | 8.30 | 8.34 | 0.06 | 100 | 8.18 | 6.50 |
| hsa-asg-14136 | hsa-asg-14136_st2 | 8.47 | 8.35 | 8.38 | 8.40 | 0.07 | 100 | 8.66 | 8.52 |
| hsa-asg-14135 | hsa-asg-14135_st1 | 5.52 | 3.85 | 5.37 | 4.91 | 0.92 | 66.66 | 3.36 | 3.83 |
| hsa-asg-14133 | hsa-asg-14133_st2 | 6.85 | 6.87 | 7.42 | 7.05 | 0.32 | 100 | 4.61 | 6.17 |
| hsa-asg-14068 | hsa-asg-14068_st2 | 13.22 | 13.21 | 13.08 | 13.17 | 0.08 | 100 | 13.69 | 13.41 |
| hsa-asg-14066 | hsa-asg-14066_st2 | 8.66 | 8.66 | 8.77 | 8.69 | 0.07 | 66.66 | 9.41 | 9.16 |
| hsa-asg-14053 | hsa-asg-14053_st2 | 4.94 | 5.27 | 3.38 | 4.53 | 1.01 | 0 | 6.12 | 6.06 |
| hsa-asg-14034 | hsa-asg-14034_st1 | 13.49 | 13.52 | 13.30 | 13.43 | 0.12 | 100 | 13.13 | 13.01 |
| hsa-asg-14026 | hsa-asg-14026_st1 | 2.38 | 1.48 | 2.31 | 2.06 | 0.50 | 0 | 2.99 | 3.13 |
| hsa-asg-14002 | hsa-asg-14002_st1 | 10.35 | 10.75 | 10.04 | 10.38 | 0.35 | 100 | 9.13 | 9.15 |
| hsa-asg-14 | hsa-asg-14_st1 | 4.99 | 4.94 | 5.42 | 5.12 | 0.26 | 100 | 2.51 | 4.14 |
| hsa-asg-13988 | hsa-asg-13988_st1 | 2.38 | 2.68 | 2.93 | 2.66 | 0.28 | 0 | 4.98 | 6.90 |
| hsa-asg-13970 | hsa-asg-13970_st2 | 8.15 | 8.73 | 8.61 | 8.50 | 0.31 | 100 | 7.93 | 7.44 |
| hsa-asg-13966 | hsa-asg-13966_st2 | 11.28 | 10.45 | 10.83 | 10.85 | 0.42 | 100 | 9.29 | 9.62 |
| hsa-asg-13933 | hsa-asg-13933_st2 | 10.30 | 9.91 | 9.55 | 9.92 | 0.38 | 100 | 8.00 | 8.74 |
| hsa-asg-13931 | hsa-asg-13931_st2 | 7.60 | 5.34 | 6.72 | 6.55 | 1.14 | 66.66 | 8.64 | 7.61 |
| hsa-asg-1389 | hsa-asg-1389_st2 | 13.17 | 13.06 | 12.95 | 13.06 | 0.11 | 100 | 13.67 | 13.61 |
| hsa-asg-13882 | hsa-asg-13882_st1 | 1.40 | 0.40 | 1.37 | 1.06 | 0.57 | 0 | 2.08 | 1.86 |
| hsa-asg-13870 | hsa-asg-13870_st2 | 10.00 | 10.70 | 10.45 | 10.38 | 0.35 | 100 | 9.96 | 9.85 |
| hsa-asg-13851 | hsa-asg-13851_st1 | 3.63 | 1.79 | 1.65 | 2.36 | 1.11 | 0 | 5.34 | 5.61 |
| hsa-asg-13819 | hsa-asg-13819_st1 | 3.00 | 2.99 | 2.65 | 2.88 | 0.20 | 0 | 2.08 | 1.86 |
| hsa-asg-13764 | hsa-asg-13764_st1 | 8.97 | 7.95 | 8.77 | 8.56 | 0.54 | 33.33 | 9.64 | 10.19 |
| hsa-asg-13736 | hsa-asg-13736_st2 | 9.46 | 9.04 | 9.65 | 9.38 | 0.31 | 100 | 8.87 | 8.80 |
| hsa-asg-13730 | hsa-asg-13730_st2 | 1.78 | 1.48 | 1.37 | 1.54 | 0.21 | 0 | 3.66 | 5.86 |
| hsa-asg-13659 | hsa-asg-13659_st2 | 9.82 | 10.04 | 10.02 | 9.96 | 0.12 | 100 | 9.65 | 9.24 |
| hsa-asg-13646 | hsa-asg-13646_st1 | 8.57 | 8.58 | 9.35 | 8.83 | 0.45 | 100 | 5.47 | 6.55 |
| hsa-asg-13620 | hsa-asg-13620_st1 | 12.85 | 12.60 | 12.60 | 12.69 | 0.14 | 100 | 13.20 | 12.88 |
| hsa-asg-13611 | hsa-asg-13611_st2 | 4.24 | 3.26 | 5.62 | 4.37 | 1.19 | 0 | 6.91 | 6.09 |
| hsa-asg-13606 | hsa-asg-13606_st2 | 10.78 | 11.55 | 10.81 | 11.05 | 0.44 | 100 | 12.17 | 11.74 |
| hsa-asg-13501 | hsa-asg-13501_st1 | 4.80 | 3.68 | 5.42 | 4.63 | 0.89 | 0 | 6.56 | 7.42 |
| hsa-asg-13500 | hsa-asg-13500_st1 | 9.27 | 9.05 | 9.41 | 9.24 | 0.18 | 0 | 10.23 | 9.80 |
| hsa-asg-13498 | hsa-asg-13498_st1 | 7.36 | 7.56 | 6.64 | 7.18 | 0.48 | 0 | 8.57 | 8.79 |
| hsa-asg-13450 | hsa-asg-13450_st1 | 3.99 | 2.29 | 3.87 | 3.38 | 0.95 | 0 | 5.82 | 7.05 |
| hsa-asg-13444 | hsa-asg-13444_st2 | 2.10 | 2.05 | 1.65 | 1.93 | 0.25 | 0 | 3.83 | 4.80 |
| hsa-asg-13436 | hsa-asg-13436_st1 | 7.21 | 8.28 | 7.87 | 7.79 | 0.54 | 100 | 6.58 | 5.20 |
| hsa-asg-13404 | hsa-asg-13404_st2 | 6.80 | 3.26 | 2.80 | 4.29 | 2.19 | 33.33 | 1.83 | 0.27 |
| hsa-asg-13387 | hsa-asg-13387_st1 | 7.88 | 8.31 | 9.12 | 8.44 | 0.63 | 66.66 | 9.51 | 9.43 |
| hsa-asg-1337 | hsa-asg-1337_st1 | 8.73 | 8.76 | 8.18 | 8.56 | 0.33 | 100 | 6.44 | 6.99 |
| hsa-asg-13353 | hsa-asg-13353_st1 | 4.31 | 3.20 | 5.96 | 4.49 | 1.39 | 0 | 9.28 | 8.16 |
| hsa-asg-13349 | hsa-asg-13349_st2 | 4.16 | 3.26 | 4.69 | 4.04 | 0.73 | 66.66 | 2.69 | 3.02 |
| hsa-asg-13334 | hsa-asg-13334_st2 | 5.14 | 5.85 | 5.68 | 5.56 | 0.37 | 33.33 | 3.75 | 4.17 |
| hsa-asg-13320 | hsa-asg-13320_st1 | 5.75 | 4.90 | 5.19 | 5.28 | 0.43 | 66.66 | 3.66 | 4.35 |
| hsa-asg-13306 | hsa-asg-13306_st2 | 13.07 | 12.92 | 12.80 | 12.93 | 0.14 | 100 | 12.58 | 12.37 |
| hsa-asg-13304 | hsa-asg-13304_st2 | 7.39 | 7.73 | 6.70 | 7.27 | 0.53 | 100 | 3.66 | 2.37 |
| hsa-asg-13303 | hsa-asg-13303_st1 | 3.45 | 2.05 | 1.90 | 2.47 | 0.86 | 0 | 6.98 | 4.65 |
| hsa-asg-13294 | hsa-asg-13294_st2 | 5.40 | 5.28 | 6.02 | 5.57 | 0.40 | 33.33 | 4.52 | 4.51 |
| hsa-asg-13279 | hsa-asg-13279_st1 | 8.30 | 8.39 | 8.92 | 8.54 | 0.33 | 100 | 6.33 | 5.05 |
| hsa-asg-13270 | hsa-asg-13270_st2 | 6.78 | 6.13 | 3.56 | 5.49 | 1.70 | 66.66 | 2.99 | 1.74 |
| hsa-asg-13260 | hsa-asg-13260_st1 | 11.11 | 10.42 | 11.00 | 10.85 | 0.37 | 100 | 10.27 | 9.97 |
| hsa-asg-1324 | hsa-asg-1324_st2 | 4.38 | 4.33 | 4.69 | 4.47 | 0.20 | 66.66 | 3.13 | 2.76 |
| hsa-asg-13237 | hsa-asg-13237_st1 | 10.10 | 9.92 | 10.13 | 10.05 | 0.11 | 100 | 9.22 | 9.07 |
| hsa-asg-13230 | hsa-asg-13230_st2 | 7.32 | 6.24 | 8.03 | 7.20 | 0.90 | 100 | 5.02 | 3.02 |
| hsa-asg-13203 | hsa-asg-13203_st1 | 3.69 | 4.14 | 4.65 | 4.16 | 0.48 | 0 | 9.11 | 8.17 |
| hsa-asg-13166 | hsa-asg-13166_st2 | 6.42 | 3.48 | 5.30 | 5.07 | 1.48 | 66.66 | 2.51 | 2.08 |
| hsa-asg-13143 | hsa-asg-13143_st2 | 15.11 | 14.88 | 14.67 | 14.89 | 0.22 | 100 | 14.41 | 14.27 |
| hsa-asg-13097 | hsa-asg-13097_st1 | 8.94 | 9.60 | 8.91 | 9.15 | 0.39 | 100 | 5.62 | 1.86 |
| hsa-asg-13091 | hsa-asg-13091_st2 | 8.85 | 8.89 | 8.57 | 8.77 | 0.17 | 100 | 9.99 | 9.72 |
| hsa-asg-13079 | hsa-asg-13079_st2 | 11.42 | 11.62 | 11.33 | 11.46 | 0.15 | 100 | 11.68 | 11.76 |
| hsa-asg-1306 | hsa-asg-1306_st2 | 6.27 | 7.43 | 6.62 | 6.77 | 0.59 | 0 | 7.80 | 8.28 |
| hsa-asg-13051 | hsa-asg-13051_st1 | 3.32 | 4.21 | 4.53 | 4.02 | 0.63 | 33.33 | 2.99 | 2.28 |
| hsa-asg-12996 | hsa-asg-12996_st1 | 9.48 | 9.07 | 9.35 | 9.30 | 0.21 | 100 | 8.60 | 8.67 |
| hsa-asg-12973 | hsa-asg-12973_st2 | 6.18 | 5.48 | 6.79 | 6.15 | 0.65 | 100 | 3.91 | 5.47 |
| hsa-asg-12946 | hsa-asg-12946_st1 | 11.39 | 11.18 | 11.37 | 11.31 | 0.12 | 100 | 12.14 | 11.74 |
| hsa-asg-12943 | hsa-asg-12943_st2 | 4.57 | 4.14 | 4.61 | 4.44 | 0.26 | 66.66 | 3.57 | 2.89 |
| hsa-asg-12941 | hsa-asg-12941_st1 | 8.00 | 8.37 | 8.18 | 8.18 | 0.19 | 100 | 8.79 | 9.46 |
| hsa-asg-12937 | hsa-asg-12937_st2 | 11.61 | 11.84 | 11.62 | 11.69 | 0.13 | 100 | 11.26 | 11.38 |
| hsa-asg-12930 | hsa-asg-12930_st1 | 0.97 | 1.14 | 1.65 | 1.26 | 0.35 | 0 | 4.57 | 1.86 |
| hsa-asg-12919 | hsa-asg-12919_st2 | 12.71 | 12.70 | 12.53 | 12.65 | 0.10 | 100 | 13.37 | 13.11 |
| hsa-asg-12897 | hsa-asg-12897_st1 | 7.63 | 8.03 | 7.87 | 7.85 | 0.20 | 0 | 7.36 | 7.00 |
| hsa-asg-12880 | hsa-asg-12880_st1 | 9.33 | 9.66 | 9.48 | 9.49 | 0.17 | 33.33 | 10.65 | 10.10 |
| hsa-asg-12842 | hsa-asg-12842_st1 | 2.61 | 2.99 | 5.32 | 3.64 | 1.47 | 33.33 | 6.97 | 5.93 |
| hsa-asg-12821 | hsa-asg-12821_st1 | 6.34 | 5.31 | 5.45 | 5.70 | 0.56 | 100 | 4.36 | 4.30 |
| hsa-asg-12807 | hsa-asg-12807_st2 | 5.06 | 5.25 | 5.62 | 5.31 | 0.29 | 33.33 | 1.83 | 4.71 |
| hsa-asg-12799 | hsa-asg-12799_st1 | 8.94 | 8.95 | 8.21 | 8.70 | 0.43 | 33.33 | 8.24 | 6.62 |
| hsa-asg-12775 | hsa-asg-12775_st1 | 11.21 | 11.17 | 11.14 | 11.18 | 0.03 | 100 | 12.17 | 11.83 |
| hsa-asg-12746 | hsa-asg-12746_st1 | 4.69 | 5.05 | 5.25 | 5.00 | 0.28 | 100 | 4.12 | 2.76 |
| hsa-asg-12734 | hsa-asg-12734_st1 | 8.26 | 8.90 | 8.07 | 8.41 | 0.44 | 100 | 7.57 | 6.92 |
| hsa-asg-12653 | hsa-asg-12653_st1 | 7.07 | 7.56 | 7.34 | 7.33 | 0.24 | 100 | 5.02 | 5.86 |
| hsa-asg-12605 | hsa-asg-12605_st2 | 8.98 | 9.58 | 8.96 | 9.17 | 0.35 | 100 | 7.31 | 8.35 |
| hsa-asg-12602 | hsa-asg-12602_st1 | 2.38 | 2.29 | 2.31 | 2.33 | 0.04 | 0 | 1.54 | 1.62 |
| hsa-asg-12595 | hsa-asg-12595_st2 | 8.27 | 8.80 | 8.05 | 8.37 | 0.38 | 100 | 9.57 | 9.43 |
| hsa-asg-12581 | hsa-asg-12581_st1 | 10.51 | 10.62 | 10.52 | 10.55 | 0.06 | 100 | 11.32 | 11.19 |
| hsa-asg-12503 | hsa-asg-12503_st1 | 1.78 | 3.26 | 4.23 | 3.09 | 1.24 | 0 | 4.61 | 5.02 |
| hsa-asg-12485 | hsa-asg-12485_st2 | 4.45 | 5.05 | 3.80 | 4.43 | 0.63 | 66.66 | 3.13 | 3.24 |
| hsa-asg-12464 | hsa-asg-12464_st1 | 2.38 | 2.49 | 2.49 | 2.45 | 0.07 | 0 | 1.83 | 2.28 |
| hsa-asg-12443 | hsa-asg-12443_st1 | 3.32 | 3.85 | 3.80 | 3.65 | 0.29 | 100 | 2.69 | 2.45 |
| hsa-asg-12441 | hsa-asg-12441_st1 | 10.28 | 10.19 | 9.82 | 10.10 | 0.24 | 100 | 11.08 | 10.84 |
| hsa-asg-1243 | hsa-asg-1243_st1 | 6.79 | 6.40 | 7.03 | 6.74 | 0.32 | 0 | 7.67 | 7.82 |
| hsa-asg-12424 | hsa-asg-12424_st2 | 10.64 | 10.54 | 10.07 | 10.41 | 0.30 | 100 | 9.37 | 9.23 |
| hsa-asg-12421 | hsa-asg-12421_st1 | 8.77 | 8.30 | 9.65 | 8.91 | 0.69 | 0 | 9.94 | 10.18 |
| hsa-asg-12403 | hsa-asg-12403_st2 | 5.48 | 4.98 | 4.98 | 5.15 | 0.29 | 100 | 4.57 | 4.35 |
| hsa-asg-12386 | hsa-asg-12386_st1 | 7.87 | 6.87 | 7.75 | 7.49 | 0.55 | 0 | 8.52 | 8.65 |
| hsa-asg-12331 | hsa-asg-12331_st1 | 4.85 | 6.91 | 6.49 | 6.08 | 1.09 | 66.66 | 7.93 | 7.67 |
| hsa-asg-12330 | hsa-asg-12330_st1 | 5.86 | 4.55 | 5.16 | 5.19 | 0.66 | 33.33 | 4.12 | 4.46 |
| hsa-asg-1233 | hsa-asg-1233_st1 | 11.24 | 10.87 | 10.89 | 11.00 | 0.21 | 33.33 | 11.40 | 11.71 |
| hsa-asg-12309 | hsa-asg-12309_st1 | 10.83 | 10.89 | 10.73 | 10.81 | 0.08 | 100 | 10.00 | 9.96 |
| hsa-asg-12302 | hsa-asg-12302_st1 | 9.13 | 9.52 | 9.59 | 9.41 | 0.25 | 33.33 | 8.05 | 8.91 |
| hsa-asg-12297 | hsa-asg-12297_st2 | 10.83 | 10.88 | 11.16 | 10.96 | 0.18 | 100 | 9.53 | 9.05 |
| hsa-asg-12289 | hsa-asg-12289_st1 | 11.81 | 11.96 | 11.75 | 11.84 | 0.11 | 100 | 12.42 | 12.11 |
| hsa-asg-12278 | hsa-asg-12278_st2 | 10.19 | 10.26 | 10.76 | 10.40 | 0.31 | 100 | 9.81 | 9.88 |
| hsa-asg-1227 | hsa-asg-1227_st1 | 4.99 | 5.89 | 5.16 | 5.35 | 0.48 | 33.33 | 6.55 | 6.22 |
| hsa-asg-12247 | hsa-asg-12247_st2 | 12.30 | 12.43 | 12.27 | 12.33 | 0.08 | 100 | 12.13 | 12.18 |
| hsa-asg-12244 | hsa-asg-12244_st1 | 9.41 | 8.74 | 8.57 | 8.91 | 0.45 | 100 | 7.59 | 7.67 |
| hsa-asg-12119 | hsa-asg-12119_st2 | 6.76 | 6.03 | 6.59 | 6.46 | 0.39 | 100 | 2.08 | 3.13 |
| hsa-asg-12096 | hsa-asg-12096_st2 | 3.80 | 3.48 | 3.47 | 3.58 | 0.18 | 0 | 3.36 | 2.61 |
| hsa-asg-12058 | hsa-asg-12058_st1 | 5.24 | 6.72 | 5.76 | 5.91 | 0.75 | 33.33 | 7.09 | 7.85 |
| hsa-asg-12049 | hsa-asg-12049_st2 | 10.45 | 10.55 | 10.46 | 10.49 | 0.06 | 100 | 9.48 | 9.47 |
| hsa-asg-12027 | hsa-asg-12027_st1 | 4.90 | 4.33 | 4.73 | 4.65 | 0.29 | 33.33 | 2.85 | 3.60 |
| hsa-asg-1201 | hsa-asg-1201_st2 | 9.63 | 9.66 | 9.89 | 9.73 | 0.14 | 100 | 10.24 | 10.49 |
| hsa-asg-11997 | hsa-asg-11997_st1 | 5.59 | 5.89 | 4.88 | 5.45 | 0.52 | 33.33 | 4.05 | 5.05 |
| hsa-asg-11982 | hsa-asg-11982_st1 | 9.23 | 10.26 | 9.28 | 9.59 | 0.58 | 100 | 7.95 | 8.73 |
| hsa-asg-11975 | hsa-asg-11975_st1 | 9.98 | 10.04 | 9.91 | 9.98 | 0.06 | 100 | 10.61 | 10.25 |
| hsa-asg-11962 | hsa-asg-11962_st1 | 8.73 | 9.28 | 8.98 | 9.00 | 0.28 | 100 | 8.58 | 8.55 |
| hsa-asg-11956 | hsa-asg-11956_st1 | 9.36 | 9.02 | 9.25 | 9.21 | 0.17 | 100 | 8.71 | 8.42 |
| hsa-asg-11946 | hsa-asg-11946_st1 | 10.46 | 10.88 | 10.39 | 10.58 | 0.26 | 100 | 9.81 | 10.13 |
| hsa-asg-11940 | hsa-asg-11940_st1 | 9.01 | 9.12 | 8.90 | 9.01 | 0.11 | 100 | 8.60 | 8.57 |
| hsa-asg-11912 | hsa-asg-11912_st2 | 7.97 | 8.10 | 7.49 | 7.85 | 0.32 | 100 | 3.75 | 3.72 |
| hsa-asg-1189 | hsa-asg-1189_st1 | 9.54 | 9.97 | 9.58 | 9.70 | 0.24 | 100 | 7.61 | 9.05 |
| hsa-asg-11877 | hsa-asg-11877_st1 | 7.44 | 7.98 | 7.13 | 7.52 | 0.43 | 33.33 | 7.07 | 6.75 |
| hsa-asg-11872 | hsa-asg-11872_st1 | 6.38 | 3.93 | 3.87 | 4.72 | 1.43 | 33.33 | 1.83 | 2.69 |
| hsa-asg-11827 | hsa-asg-11827_st1 | 2.10 | 3.48 | 2.65 | 2.74 | 0.69 | 0 | 5.25 | 3.75 |
| hsa-asg-11818 | hsa-asg-11818_st2 | 11.87 | 12.21 | 11.89 | 11.99 | 0.19 | 100 | 11.33 | 11.14 |
| hsa-asg-11766 | hsa-asg-11766_st1 | 3.69 | 3.37 | 3.38 | 3.48 | 0.18 | 0 | 3.83 | 3.83 |
| hsa-asg-11758 | hsa-asg-11758_st2 | 12.83 | 12.81 | 12.56 | 12.73 | 0.15 | 100 | 13.12 | 13.01 |
| hsa-asg-11698 | hsa-asg-11698_st2 | 10.99 | 11.24 | 10.97 | 11.07 | 0.15 | 100 | 11.99 | 11.58 |
| hsa-asg-11686 | hsa-asg-11686_st2 | 1.40 | 1.48 | 1.37 | 1.42 | 0.06 | 0 | 2.31 | 1.86 |
| hsa-asg-11643 | hsa-asg-11643_st1 | 4.08 | 4.33 | 3.80 | 4.07 | 0.27 | 33.33 | 2.69 | 2.89 |
| hsa-asg-11639 | hsa-asg-11639_st2 | 3.99 | 4.00 | 4.77 | 4.25 | 0.45 | 33.33 | 3.57 | 2.61 |
| hsa-asg-11635 | hsa-asg-11635_st1 | 3.69 | 1.48 | 2.12 | 2.43 | 1.14 | 0 | 3.47 | 6.03 |
| hsa-asg-11617 | hsa-asg-11617_st2 | 9.91 | 9.97 | 9.59 | 9.83 | 0.21 | 100 | 10.06 | 10.59 |
| hsa-asg-11612 | hsa-asg-11612_st1 | 9.65 | 8.56 | 9.66 | 9.29 | 0.63 | 100 | 7.82 | 7.99 |
| hsa-asg-11608 | hsa-asg-11608_st1 | 11.02 | 11.12 | 10.98 | 11.04 | 0.08 | 100 | 9.68 | 10.28 |
| hsa-asg-11606 | hsa-asg-11606_st1 | 11.76 | 12.05 | 11.79 | 11.87 | 0.16 | 100 | 11.39 | 11.17 |
| hsa-asg-11579 | hsa-asg-11579_st2 | 4.90 | 5.45 | 5.54 | 5.30 | 0.35 | 100 | 2.51 | 2.89 |
| hsa-asg-1157 | hsa-asg-1157_st1 | 8.72 | 9.50 | 8.69 | 8.97 | 0.46 | 100 | 7.55 | 7.14 |
| hsa-asg-11563 | hsa-asg-11563_st2 | 10.13 | 11.19 | 10.58 | 10.63 | 0.54 | 100 | 9.65 | 9.44 |
| hsa-asg-11535 | hsa-asg-11535_st2 | 13.98 | 13.99 | 13.79 | 13.92 | 0.12 | 100 | 13.64 | 13.43 |
| hsa-asg-11513 | hsa-asg-11513_st1 | 10.14 | 10.06 | 10.08 | 10.09 | 0.04 | 100 | 9.28 | 9.57 |
| hsa-asg-11503 | hsa-asg-11503_st1 | 9.42 | 8.62 | 9.22 | 9.09 | 0.41 | 33.33 | 8.74 | 8.38 |
| hsa-asg-1140 | hsa-asg-1140_st2 | 7.94 | 8.12 | 8.47 | 8.18 | 0.27 | 100 | 7.58 | 7.60 |
| hsa-asg-11389 | hsa-asg-11389_st1 | 11.85 | 11.83 | 11.77 | 11.82 | 0.04 | 100 | 12.48 | 12.24 |
| hsa-asg-11388 | hsa-asg-11388_st1 | 7.74 | 7.72 | 7.73 | 7.73 | 0.01 | 100 | 6.97 | 7.26 |
| hsa-asg-11384 | hsa-asg-11384_st1 | 1.78 | 1.79 | 2.12 | 1.89 | 0.19 | 0 | 2.08 | 3.13 |
| hsa-asg-11381 | hsa-asg-11381_st2 | 8.76 | 9.20 | 9.60 | 9.19 | 0.42 | 100 | 7.92 | 8.57 |
| hsa-asg-11336 | hsa-asg-11336_st2 | 10.27 | 10.53 | 10.67 | 10.49 | 0.20 | 100 | 10.89 | 10.85 |
| hsa-asg-11326 | hsa-asg-11326_st2 | 7.64 | 8.33 | 8.35 | 8.11 | 0.40 | 100 | 7.12 | 7.14 |
| hsa-asg-11246 | hsa-asg-11246_st2 | 1.78 | 1.48 | 1.65 | 1.64 | 0.15 | 0 | 2.69 | 1.86 |
| hsa-asg-11228 | hsa-asg-11228_st1 | 9.92 | 10.26 | 9.97 | 10.05 | 0.19 | 100 | 9.62 | 9.65 |
| hsa-asg-11196 | hsa-asg-11196_st1 | 2.38 | 2.29 | 1.90 | 2.19 | 0.26 | 0 | 3.75 | 2.76 |
| hsa-asg-11193 | hsa-asg-11193_st1 | 11.45 | 11.71 | 11.63 | 11.60 | 0.14 | 100 | 12.26 | 12.27 |
| hsa-asg-11191 | hsa-asg-11191_st1 | 4.38 | 3.93 | 3.87 | 4.06 | 0.28 | 33.33 | 3.25 | 2.89 |
| hsa-asg-11174 | hsa-asg-11174_st1 | 7.85 | 7.64 | 8.51 | 8.00 | 0.46 | 33.33 | 9.32 | 8.70 |
| hsa-asg-11130 | hsa-asg-11130_st2 | 1.78 | 1.79 | 2.31 | 1.96 | 0.31 | 0 | 3.66 | 4.53 |
| hsa-asg-11112 | hsa-asg-11112_st2 | 10.51 | 11.18 | 10.86 | 10.85 | 0.33 | 100 | 11.57 | 11.26 |
| hsa-asg-11089 | hsa-asg-11089_st1 | 9.98 | 9.12 | 9.72 | 9.60 | 0.44 | 100 | 10.13 | 10.39 |
| hsa-asg-11061 | hsa-asg-11061_st2 | 2.10 | 2.49 | 2.65 | 2.42 | 0.28 | 0 | 6.65 | 3.60 |
| hsa-asg-11056 | hsa-asg-11056_st1 | 6.57 | 6.63 | 6.27 | 6.49 | 0.19 | 100 | 6.06 | 5.08 |
| hsa-asg-11002 | hsa-asg-11002_st2 | 5.67 | 4.64 | 6.46 | 5.59 | 0.91 | 66.66 | 3.47 | 2.37 |
| hsa-asg-10971 | hsa-asg-10971_st2 | 9.85 | 9.54 | 10.21 | 9.87 | 0.34 | 100 | 9.47 | 8.83 |
| hsa-asg-10957 | hsa-asg-10957_st1 | 0.07 | 0.78 | 2.12 | 0.99 | 1.04 | 0 | 4.47 | 4.82 |
| hsa-asg-10932 | hsa-asg-10932_st2 | 5.06 | 4.69 | 5.70 | 5.15 | 0.51 | 33.33 | 4.18 | 3.38 |
| hsa-asg-10926 | hsa-asg-10926_st2 | 2.10 | 1.79 | 1.65 | 1.84 | 0.23 | 0 | 2.99 | 5.95 |
| hsa-asg-10922 | hsa-asg-10922_st2 | 7.24 | 5.81 | 6.08 | 6.38 | 0.76 | 100 | 8.11 | 7.84 |
| hsa-asg-10918 | hsa-asg-10918_st1 | 7.11 | 7.71 | 6.51 | 7.11 | 0.60 | 100 | 4.57 | 4.57 |
| hsa-asg-10914 | hsa-asg-10914_st1 | 3.45 | 3.76 | 4.39 | 3.87 | 0.48 | 33.33 | 2.51 | 2.08 |
| hsa-asg-10901 | hsa-asg-10901_st1 | 6.53 | 6.69 | 5.89 | 6.37 | 0.42 | 100 | 7.24 | 6.90 |
| hsa-asg-10893 | hsa-asg-10893_st1 | 4.45 | 3.93 | 4.91 | 4.43 | 0.49 | 66.66 | 2.85 | 2.45 |
| hsa-asg-10862 | hsa-asg-10862_st2 | 4.24 | 4.64 | 4.61 | 4.50 | 0.23 | 100 | 2.99 | 3.34 |
| hsa-asg-10860 | hsa-asg-10860_st2 | 3.17 | 2.99 | 4.12 | 3.43 | 0.61 | 66.66 | 1.83 | 2.28 |
| hsa-asg-10810 | hsa-asg-10810_st1 | 4.38 | 4.69 | 4.44 | 4.50 | 0.17 | 100 | 3.36 | 3.43 |
| hsa-asg-10807 | hsa-asg-10807_st2 | 7.73 | 8.41 | 8.06 | 8.07 | 0.34 | 33.33 | 9.34 | 9.19 |
| hsa-asg-10647 | hsa-asg-10647_st1 | 4.12 | 2.99 | 1.90 | 3.00 | 1.11 | 0 | 5.25 | 6.48 |
| hsa-asg-10639 | hsa-asg-10639_st1 | 12.16 | 12.55 | 12.23 | 12.31 | 0.21 | 100 | 11.78 | 11.90 |
| hsa-asg-10638 | hsa-asg-10638_st2 | 11.88 | 12.00 | 11.96 | 11.95 | 0.06 | 100 | 12.33 | 12.02 |
| hsa-asg-10580 | hsa-asg-10580_st1 | 11.38 | 11.04 | 10.43 | 10.95 | 0.48 | 100 | 12.66 | 12.38 |
| hsa-asg-10576 | hsa-asg-10576_st1 | 10.14 | 11.18 | 11.09 | 10.80 | 0.58 | 100 | 9.43 | 9.58 |
| hsa-asg-10556 | hsa-asg-10556_st1 | 3.45 | 3.85 | 3.64 | 3.65 | 0.20 | 0 | 5.22 | 4.59 |
| hsa-as -10512 | hsa-asg-10512_st1 | 9.91 | 9.99 | 10.04 | 9.98 | 0.07 | 100 | 10.56 | 10.38 |
| hsa-asg-10510 | hsa-asg-10510_st2 | 5.67 | 4.78 | 5.91 | 5.45 | 0.59 | 33.33 | 6.54 | 7.63 |
| hsa-asg-10481 | hsa-asg-10481_st1 | 7.64 | 7.06 | 6.80 | 7.17 | 0.43 | 100 | 6.37 | 5.35 |
| hsa-asg-10480 | hsa-asg-10480_st1 | 2.50 | 1.79 | 3.28 | 2.52 | 0.75 | 0 | 6.42 | 3.79 |
| hsa-asg-10411 | hsa-asg-10411_st1 | 7.47 | 6.39 | 5.66 | 6.51 | 0.91 | 66.66 | 10.49 | 10.07 |
| hsa-asg-1038 | hsa-asg-1038_st2 | 3.99 | 4.00 | 3.56 | 3.85 | 0.25 | 0 | 8.03 | 6.60 |
| hsa-asg-10371 | hsa-asg-10371_st2 | 3.00 | 2.49 | 3.17 | 2.89 | 0.35 | 0 | 1.83 | 1.05 |
| hsa-asg-10273 | hsa-asg-10273_st1 | 2.38 | 2.29 | 3.94 | 2.87 | 0.93 | 0 | 6.44 | 6.06 |
| hsa-asg-10263 | hsa-asg-10263_st2 | 4.90 | 4.44 | 4.34 | 4.56 | 0.30 | 100 | 2.31 | 2.28 |
| hsa-asg-1026 | hsa-asg-1026_st2 | 5.04 | 5.45 | 5.13 | 5.21 | 0.22 | 100 | 5.47 | 5.58 |
| hsa-asg-10256 | hsa-asg-10256_st1 | 2.10 | 2.84 | 1.37 | 2.11 | 0.74 | 0 | 3.36 | 4.84 |
| hsa-asg-10247 | hsa-asg-10247_st1 | 4.31 | 2.84 | 3.56 | 3.57 | 0.73 | 33.33 | 2.08 | 2.45 |
| hsa-asg-10235 | hsa-asg-10235_st2 | 4.85 | 4.00 | 4.12 | 4.32 | 0.46 | 33.33 | 6.25 | 6.13 |
| hsa-asg-10231 | hsa-asg-10231_st1 | 5.33 | 4.98 | 4.77 | 5.03 | 0.28 | 0 | 2.08 | 3.86 |
| hsa-asg-10229 | hsa-asg-10229_st2 | 5.38 | 4.60 | 4.44 | 4.81 | 0.51 | 66.66 | 3.66 | 2.61 |
| hsa-asg-10222 | hsa-asg-10222_st2 | 5.20 | 4.69 | 4.88 | 4.92 | 0.26 | 100 | 3.57 | 3.75 |
| hsa-asg-10199 | hsa-asg-10199_st1 | 10.09 | 10.28 | 10.46 | 10.28 | 0.19 | 100 | 9.77 | 9.55 |
| hsa-asg-10197 | hsa-asg-10197_st2 | 10.47 | 10.25 | 9.89 | 10.20 | 0.29 | 100 | 9.22 | 9.74 |
| hsa-asg-10195 | hsa-asg-10195_st2 | 9.87 | 10.00 | 9.61 | 9.83 | 0.20 | 100 | 8.13 | 8.97 |
| hsa-asg-10181 | hsa-asg-10181_st1 | 8.53 | 8.20 | 8.86 | 8.53 | 0.33 | 100 | 10.02 | 9.80 |
| hsa-asg-1018 | hsa-asg-1018_st2 | 7.14 | 7.82 | 8.36 | 7.77 | 0.61 | 100 | 6.18 | 6.90 |
| hsa-asg-10170 | hsa-asg-10170_st2 | 5.08 | 5.97 | 6.71 | 5.92 | 0.82 | 66.66 | 3.66 | 4.17 |
| hsa-asg-10158 | hsa-asg-10158_st2 | 5.20 | 6.46 | 7.39 | 6.35 | 1.10 | 66.66 | 3.83 | 4.37 |
| hsa-asg-10141 | hsa-asg-10141_st1 | 1.78 | 0.40 | 1.37 | 1.18 | 0.71 | 0 | 2.51 | 4.02 |
| hsa-asg-10081 | hsa-asg-10081_st1 | 3.99 | 4.60 | 3.06 | 3.88 | 0.77 | 33.33 | 1.54 | 2.08 |
| hsa-asg-10076 | hsa-asg-10076_st1 | 10.16 | 10.05 | 10.50 | 10.24 | 0.24 | 100 | 9.46 | 9.82 |
| hsa-asg-10037 | hsa-asg-10037_st1 | 4.51 | 4.39 | 4.65 | 4.52 | 0.13 | 0 | 6.85 | 5.38 |
| hsa-asg-1001 | hsa-asg-1001_st1 | 10.43 | 10.77 | 10.64 | 10.61 | 0.17 | 100 | 9.38 | 9.27 |
| hsa-miR-140 | hsa-asg-14239 | 8.56 | 7.97 | 9.14 | 8.56 | 0.58 | 100 | 6.71 | 2.37 |
| hsa-miR-29b | hsa-asg-14229_st2 | 11.64 | 11.42 | 11.99 | 11.68 | 0.29 | 100 | 9.51 | 8.26 |
| hsa-miR-329 | hsa-asg-13589_st2 | 7.90 | 2.84 | 6.69 | 5.81 | 2.64 | 66.66 | 1.83 | 1.62 |
| hsa-miR-329 | hsa-asg-13204_st2 | 8.02 | 5.31 | 6.37 | 6.57 | 1.36 | 100 | 3.66 | 2.08 |
| hsa-miR-365 | hsa-asg-13156_st1 | 6.30 | 6.79 | 8.37 | 7.15 | 1.08 | 100 | 1.22 | 2.08 |
| hsa-miR-369- | hsa-asg-1521_st1 | 6.41 | 4.94 | 6.88 | 6.07 | 1.01 | 66.66 | 2.51 | 1.35 |
| 5p | | | | | | | | | |
| hsa-miR-376a | hsa-asg-10049_st1 | 8.08 | 6.54 | 7.85 | 7.49 | 0.83 | 100 | 3.66 | 2.76 |
| hsa-miR-376a | hsa-asg-14234_st1 | 6.61 | 4.55 | 6.72 | 5.96 | 1.22 | 100 | 1.83 | 1.62 |
| hsa-miR-421 | hsa-asg-5033_st2 | 7.09 | 7.30 | 8.00 | 7.46 | 0.47 | 100 | 1.22 | 3.86 |
| hsa-miR-451 | hsa-asg-13195_st2 | 14.10 | 13.96 | 14.24 | 14.10 | 0.14 | 100 | 9.36 | 9.26 |
| hsa-miR-497 | hsa-miR43_st1 | 12.90 | 12.34 | 12.47 | 12.57 | 0.29 | 100 | 8.05 | 8.41 |
| hsa-miR-517a | hsa-miR-517b_st1 | 7.65 | 6.77 | 6.29 | 6.91 | 0.69 | 100 | 2.31 | 1.86 |
| hsa-miR-551b | hsa-miR167_st2 | 8.16 | 8.63 | 9.04 | 8.61 | 0.44 | 100 | 0.86 | 3.47 |
| hsa-miR-99b | hsa-asg-14196_st2 | 11.33 | 11.54 | 11.57 | 11.48 | 0.13 | 66.66 | 8.48 | 8.15 |
| hsa-miR- | hsa-asg-14140_st1 | 14.32 | 13.89 | 13.98 | 14.07 | 0.23 | 100 | 10.49 | 9.76 |
| 199a* | | | | | | | | | |
| hsa-miR-224 | hsa-asg-14247_st1 | 11.48 | 12.27 | 12.00 | 11.92 | 0.40 | 100 | 5.02 | 4.65 |

| | | | | | | NBr vs LNneg | | |
|---|---|---|---|---|---|---|---|---|
| Micro | LNneg | | | | | | | Fold |
| RNA | 3 | 4 | Mean | SD | % | ttest | Log2Diff | Change |
| hsa-let-7a | 13.24 | 13.22 | 13.01 | 0.30 | 100 | 3.44E−04 | 1.74 | 3 |
| hsa-let-7b | 11.57 | 11.57 | 11.27 | 0.40 | 100 | 2.43E−04 | 2.28 | 5 |
| hsa-let-7c | 12.44 | 12.53 | 12.27 | 0.26 | 100 | 5.79E−05 | 2.11 | 4 |
| hsa-let-7d | 12.65 | 12.66 | 12.40 | 0.31 | 100 | 1.69E−04 | 1.97 | 4 |
| hsa-let-7e | 10.14 | 10.40 | 10.09 | 0.34 | 100 | 9.27E−05 | 2.35 | 5 |
| hsa-let-7f | 12.70 | 12.91 | 12.35 | 0.54 | 100 | 1.56E−03 | 2.05 | 4 |
| hsa-let-7g | 12.34 | 12.33 | 12.07 | 0.44 | 100 | 1.71E−03 | 1.72 | 3 |
| hsa-let-7i | 10.84 | 11.37 | 10.92 | 0.40 | 100 | 2.57E−04 | 2.41 | 5 |
| hsa-miR-1 | 2.34 | 4.12 | 2.47 | 1.18 | 25 | 9.54E−03 | 6.54 | 93 |
| hsa-miR-100 | 10.11 | 10.00 | 9.76 | 0.34 | 100 | 2.72E−05 | 3.27 | 10 |
| hsa-miR-101 | 4.92 | 4.18 | 5.25 | 0.89 | 75 | 1.14E−03 | 3.84 | 14 |
| hsa-miR-103 | 11.22 | 11.27 | 11.02 | 0.26 | 100 | 3.22E−05 | 2.33 | 5 |
| hsa-miR-106a | 9.68 | 10.20 | 9.73 | 0.34 | 100 | 1.11E−04 | 2.94 | 8 |
| hsa-miR-106b | 8.17 | 7.51 | 7.44 | 0.61 | 100 | 4.15E−04 | 3.63 | 12 |
| hsa-miR-107 | 10.93 | 11.04 | 10.71 | 0.34 | 100 | 7.31E−05 | 2.46 | 6 |
| hsa-miR-10a | 8.27 | 8.56 | 8.30 | 0.19 | 100 | 6.66E−07 | 3.50 | 11 |
| hsa-miR-10b | 9.93 | 10.39 | 9.95 | 0.38 | 100 | 5.10E−05 | 2.93 | 8 |
| hsa-miR-125a | 10.35 | 9.98 | 10.03 | 0.22 | 100 | 2.75E−05 | 2.29 | 5 |
| hsa-miR-125b | 11.62 | 12.09 | 11.49 | 0.58 | 100 | 5.73E−04 | 2.83 | 7 |
| hsa-miR-126 | 12.27 | 12.39 | 12.20 | 0.28 | 100 | 3.48E−05 | 2.36 | 5 |
| hsa-miR-126* | 1.84 | 1.94 | 2.26 | 0.44 | 0 | 5.29E−04 | 3.36 | 10 |
| hsa-miR-127 | 4.65 | 5.23 | 4.71 | 0.39 | 0 | 7.37E−04 | 4.53 | 23 |
| hsa-miR-128a | 6.91 | 6.64 | 6.19 | 0.73 | 100 | 7.88E−04 | 3.28 | 10 |
| hsa-miR-128b | 7.50 | 7.65 | 7.04 | 0.75 | 75 | 1.63E−03 | 2.75 | 7 |
| hsa-miR-130a | 8.60 | 8.45 | 8.35 | 0.25 | 100 | 1.22E−04 | 2.91 | 8 |
| hsa-miR-130b | 5.93 | 6.29 | 6.16 | 0.31 | 75 | 1.09E−03 | 1.73 | 3 |
| hsa-miR-132 | 5.81 | 6.08 | 5.06 | 1.92 | 0 | 2.23E−02 | 4.01 | 16 |
| hsa-miR-133a | 1.53 | 2.92 | 2.16 | 0.75 | 0 | 4.37E−02 | 5.00 | 32 |
| hsa-miR-134 | 7.94 | 7.41 | 7.68 | 0.32 | 50 | 4.88E−02 | 0.71 | 2 |
| hsa-miR-137 | 2.11 | 1.94 | 2.05 | 0.08 | 0 | 4.52E−02 | 0.28 | 1 |
| hsa-miR-139 | 8.02 | 6.99 | 6.89 | 1.36 | 75 | 6.32E−03 | 3.63 | 12 |
| hsa-miR-140 | 1.98 | 1.46 | 1.87 | 0.61 | 0 | 4.21E−05 | 5.83 | 57 |
| hsa-miR-141 | 1.19 | 2.79 | 1.89 | 0.67 | 0 | 1.04E−03 | 7.34 | 162 |
| hsa-miR-143 | 9.75 | 10.53 | 10.01 | 0.35 | 100 | 6.33E−06 | 4.10 | 17 |
| hsa-miR-145 | 12.61 | 12.70 | 12.45 | 0.23 | 100 | 2.88E−05 | 2.10 | 4 |
| hsa-miR-146b | 9.85 | 10.06 | 9.62 | 0.42 | 100 | 1.47E−02 | 1.87 | 4 |
| hsa-miR-148a | 8.84 | 8.70 | 8.46 | 0.57 | 100 | 2.84E−04 | 3.91 | 15 |
| hsa-miR-148b | 5.26 | 6.53 | 5.31 | 0.87 | 100 | 3.40E−04 | 4.46 | 22 |
| hsa-miR-150 | 14.14 | 13.62 | 13.74 | 0.31 | 100 | 3.40E−04 | −1.63 | 3 |
| hsa-miR-151 | 6.13 | 7.08 | 6.52 | 0.48 | 100 | 1.76E−04 | 3.19 | 9 |
| hsa-miR-152 | 7.47 | 7.63 | 7.28 | 0.32 | 100 | 6.30E−06 | 4.35 | 20 |
| hsa-miR-154 | 1.53 | 3.15 | 2.35 | 0.83 | 0 | 1.87E−03 | 4.59 | 24 |
| hsa-miR-154* | 3.19 | 2.79 | 2.83 | 0.54 | 0 | 4.39E−04 | 2.92 | 8 |
| hsa-miR-155 | 10.97 | 11.11 | 10.72 | 0.49 | 100 | 3.68E−03 | −1.54 | 3 |
| hsa-miR-15a | 8.67 | 9.05 | 8.66 | 0.41 | 100 | 5.73E−05 | 3.42 | 11 |
| hsa-miR-15b | 9.64 | 9.32 | 9.12 | 0.55 | 100 | 8.52E−04 | 2.49 | 6 |
| hsa-miR-16 | 12.53 | 12.53 | 12.31 | 0.26 | 100 | 3.98E−05 | 2.10 | 4 |
| hsa-miR-17- | 2.74 | 5.76 | 4.96 | 1.69 | 25 | 4.98E−02 | 2.88 | 7 |
| 3p | | | | | | | | |
| hsa-miR-17- | 9.78 | 9.88 | 9.59 | 0.32 | 100 | 2.89E−04 | 2.78 | 7 |
| 5p | | | | | | | | |
| hsa-miR-181a | 10.11 | 9.38 | 9.49 | 0.43 | 100 | 5.19E−03 | 1.72 | 3 |
| hsa-miR- | 1.53 | 4.85 | 3.55 | 1.82 | 0 | 2.03E−02 | 3.62 | 12 |
| 181a* | | | | | | | | |
| hsa-miR-181b | 8.08 | 7.62 | 7.63 | 0.32 | 100 | 1.51E−02 | 1.07 | 2 |
| hsa-miR-181d | 4.23 | 3.75 | 4.22 | 0.40 | 25 | 1.99E−04 | 3.07 | 8 |
| hsa-miR-182 | 4.13 | 2.79 | 3.70 | 0.63 | 25 | 3.10E−05 | 5.77 | 55 |
| hsa-miR-185 | 6.97 | 7.23 | 6.52 | 0.99 | 100 | 3.14E−03 | 3.54 | 12 |
| hsa-miR-186 | 1.53 | 4.33 | 2.82 | 1.34 | 25 | 9.85E−03 | 3.47 | 11 |
| hsa-miR-189 | 0.61 | 1.94 | 1.17 | 0.68 | 0 | 1.47E−04 | 5.19 | 36 |
| hsa-miR-18a | 3.12 | 5.12 | 3.21 | 1.35 | 25 | 2.23E−02 | 3.22 | 9 |
| hsa-miR-18b | 2.98 | 2.33 | 2.57 | 0.77 | 0 | 2.30E−03 | 3.50 | 11 |
| hsa-miR-191 | 11.66 | 11.63 | 11.38 | 0.32 | 100 | 4.95E−04 | 1.68 | 3 |
| hsa-miR-192 | 4.35 | 6.63 | 5.92 | 1.15 | 75 | 2.81E−02 | 2.18 | 5 |
| hsa-miR-193a | 5.66 | 5.38 | 5.82 | 0.38 | 50 | 4.02E−05 | 3.50 | 11 |
| hsa-miR-193b | 8.93 | 8.20 | 8.08 | 0.77 | 25 | 1.12E−03 | 3.71 | 13 |
| hsa-miR-194 | 6.51 | 6.01 | 5.86 | 0.54 | 100 | 1.46E−03 | 2.59 | 6 |
| hsa-miR-195 | 10.48 | 10.73 | 10.33 | 0.41 | 100 | 4.17E−05 | 3.69 | 13 |
| hsa-miR-196b | 2.55 | 1.94 | 2.71 | 0.84 | 0 | 2.67E−02 | 3.27 | 10 |
| hsa-miR-199a | 9.48 | 9.31 | 9.42 | 0.23 | 100 | 3.31E−05 | 3.15 | 9 |
| hsa-miR- | 10.64 | 10.87 | 10.38 | 0.71 | 100 | 3.50E−04 | 3.73 | 13 |
| 199a* | | | | | | | | |
| hsa-miR-199b | 5.60 | 5.01 | 4.84 | 1.09 | 75 | 1.44E−04 | 7.00 | 128 |
| hsa-miR-19a | 3.54 | 3.15 | 3.08 | 0.70 | 0 | 5.77E−05 | 5.89 | 59 |
| hsa-miR-19b | 8.84 | 8.36 | 8.13 | 0.65 | 100 | 1.55E−04 | 4.41 | 21 |
| hsa-miR-200a | 2.55 | 2.79 | 2.47 | 0.29 | 0 | 2.49E−04 | 7.44 | 174 |
| hsa-miR-200b | 2.55 | 3.52 | 2.61 | 0.68 | 0 | 8.44E−05 | 8.96 | 499 |
| hsa-miR-200c | 5.74 | 7.26 | 5.98 | 0.92 | 100 | 6.12E−04 | 6.02 | 65 |
| hsa-miR-203 | 2.45 | 2.65 | 2.95 | 0.47 | 0 | 3.08E−04 | 4.23 | 19 |
| hsa-miR-205 | 3.25 | 6.93 | 3.43 | 2.54 | 25 | 1.22E−03 | 10.03 | 1048 |
| hsa-miR-20a | 9.52 | 9.21 | 9.12 | 0.40 | 100 | 1.66E−04 | 3.12 | 9 |
| hsa-miR-20b | 6.40 | 7.83 | 7.15 | 0.61 | 100 | 6.29E−04 | 3.32 | 10 |
| hsa-miR-21 | 10.51 | 10.91 | 10.49 | 0.53 | 100 | 1.42E−04 | 3.29 | 10 |
| hsa-miR-214 | 9.16 | 9.01 | 9.02 | 0.39 | 25 | 7.08E−03 | 1.12 | 2 |
| hsa-miR-215 | 2.34 | 3.34 | 2.62 | 0.49 | 0 | 7.79E−04 | 3.74 | 13 |
| hsa-miR-218 | 2.90 | 1.94 | 2.56 | 1.18 | 25 | 3.75E−04 | 6.10 | 68 |
| hsa-miR-22 | 9.09 | 9.27 | 9.08 | 0.16 | 100 | 5.38E−07 | 4.46 | 22 |
| hsa-miR-221 | 10.77 | 10.32 | 10.21 | 0.50 | 100 | 9.55E−04 | 2.32 | 5 |
| hsa-miR-222 | 10.88 | 10.66 | 10.53 | 0.41 | 75 | 2.43E−03 | 1.61 | 3 |
| hsa-miR-223 | 9.41 | 10.19 | 9.58 | 0.41 | 100 | 1.42E−03 | 2.30 | 5 |
| hsa-miR-224 | 4.29 | 6.19 | 5.32 | 0.78 | 75 | 4.95E−05 | 6.43 | 86 |
| hsa-miR-23a | 12.52 | 12.63 | 12.19 | 0.46 | 100 | 3.41E−04 | 2.34 | 5 |
| hsa-miR-23b | 12.18 | 12.31 | 11.89 | 0.42 | 100 | 2.14E−04 | 2.37 | 5 |
| hsa-miR-24 | 10.89 | 10.97 | 10.56 | 0.43 | 100 | 7.03E−05 | 3.06 | 8 |
| hsa-miR-25 | 10.03 | 9.77 | 9.82 | 0.15 | 100 | 1.25E−06 | 2.51 | 6 |
| hsa-miR-26a | 13.57 | 13.37 | 13.15 | 0.41 | 100 | 2.13E−03 | 1.50 | 3 |
| hsa-miR-26b | 9.45 | 10.73 | 9.86 | 0.68 | 100 | 8.57E−04 | 3.03 | 8 |
| hsa-miR-27a | 8.45 | 9.08 | 8.65 | 0.30 | 100 | 1.25E−05 | 4.11 | 17 |
| hsa-miR-27b | 8.56 | 9.15 | 8.47 | 0.50 | 100 | 3.01E−05 | 4.27 | 19 |
| hsa-miR-28 | 7.07 | 8.72 | 8.02 | 0.74 | 100 | 9.78E−04 | 3.09 | 9 |
| hsa-miR-299- | 2.90 | 2.50 | 2.50 | 0.34 | 0 | 1.07E−04 | 3.73 | 13 |
| 5p | | | | | | | | |
| hsa-miR-29a | 11.84 | 12.05 | 11.83 | 0.27 | 100 | 2.47E−04 | 1.55 | 3 |
| hsa-miR-29b | 9.35 | 10.04 | 9.38 | 0.76 | 100 | 6.13E−03 | 2.23 | 5 |
| hsa-miR-29c | 7.25 | 9.01 | 8.29 | 1.03 | 100 | 1.17E−02 | 2.50 | 6 |
| hsa-miR-30a- | 5.55 | 6.75 | 5.78 | 0.78 | 75 | 1.55E−04 | 4.76 | 27 |
| 3p | | | | | | | | |
| hsa-miR-30a- | 9.73 | 10.09 | 9.76 | 0.22 | 100 | 8.94E−06 | 3.55 | 12 |
| 5p | | | | | | | | |
| hsa-miR-30b | 9.52 | 10.22 | 9.61 | 0.50 | 100 | 1.97E−04 | 3.20 | 9 |
| hsa-miR-30c | 11.13 | 10.79 | 10.71 | 0.39 | 100 | 1.04E−04 | 2.82 | 7 |
| hsa-miR-30d | 10.54 | 10.50 | 10.36 | 0.20 | 100 | 2.82E−05 | 2.69 | 6 |
| hsa-miR-30e- | 6.33 | 6.55 | 6.73 | 0.62 | 100 | 1.08E−03 | 2.75 | 7 |
| 3p | | | | | | | | |
| hsa-miR-30e- | 8.19 | 8.22 | 8.17 | 0.40 | 100 | 7.24E−05 | 3.57 | 12 |
| 5p | | | | | | | | |
| hsa-miR-31 | 8.00 | 6.53 | 6.79 | 0.97 | 75 | 2.83E−02 | 2.61 | 6 |
| hsa-miR-320 | 10.18 | 9.91 | 9.86 | 0.25 | 75 | 2.29E−03 | 0.85 | 2 |
| hsa-miR-329 | 2.11 | 4.81 | 3.29 | 1.13 | 25 | 1.15E−02 | 3.28 | 10 |
| hsa-miR-335 | 5.88 | 7.29 | 6.21 | 0.85 | 100 | 4.25E−05 | 6.82 | 113 |
| hsa-miR-34a | 6.98 | 7.40 | 6.56 | 0.75 | 100 | 4.61E−03 | 2.33 | 5 |
| hsa-miR-34b | 2.34 | 2.65 | 2.44 | 0.29 | 0 | 3.10E−02 | 2.62 | 6 |
| hsa-miR-361 | 9.84 | 9.66 | 9.09 | 0.77 | 100 | 5.33E−03 | 2.19 | 5 |
| hsa-miR-362 | 6.08 | 5.04 | 5.73 | 0.48 | 25 | 3.02E−03 | 1.68 | 3 |
| hsa-miR-363 | 6.45 | 7.05 | 6.68 | 0.40 | 100 | 2.34E−03 | 2.36 | 5 |
| hsa-miR-365 | 1.84 | 3.44 | 2.79 | 0.68 | 0 | 8.86E−04 | 4.25 | 19 |
| hsa-miR-368 | 2.34 | 3.52 | 2.19 | 0.99 | 25 | 1.30E−04 | 7.94 | 246 |
| hsa-miR-369- | 1.53 | 1.71 | 1.67 | 0.13 | 0 | 4.10E−04 | 5.41 | 42 |
| 5p | | | | | | | | |
| hsa-miR-375 | 0.23 | 5.42 | 2.13 | 2.27 | 0 | 1.94E−02 | 4.59 | 24 |
| hsa-miR-376a | 3.31 | 2.92 | 2.84 | 0.43 | 0 | 3.68E−03 | 4.06 | 17 |
| hsa-miR-377 | 4.44 | 3.89 | 3.00 | 1.36 | 25 | 2.03E−02 | 3.43 | 11 |
| hsa-miR-379 | 6.13 | 4.81 | 4.50 | 1.32 | 25 | 3.17E−03 | 4.45 | 22 |
| hsa-miR-381 | 0.81 | 2.33 | 2.42 | 1.38 | 0 | 8.79E−03 | 4.25 | 19 |
| hsa-miR-382 | 5.12 | 5.09 | 5.09 | 0.42 | 0 | 6.58E−04 | 3.49 | 11 |
| hsa-miR-409- | 4.06 | 3.25 | 3.35 | 0.74 | 0 | 8.68E−03 | 2.95 | 8 |
| 5p | | | | | | | | |
| hsa-miR-410 | 2.34 | 2.33 | 2.56 | 0.45 | 0 | 3.29E−02 | 2.55 | 6 |
| hsa-miR-411 | 0.42 | 2.50 | 1.54 | 1.05 | 0 | 1.69E−04 | 6.97 | 126 |
| hsa-miR-421 | 2.82 | 1.71 | 2.38 | 0.70 | 0 | 1.69E−04 | 5.15 | 35 |
| hsa-miR-422a | 7.74 | 7.47 | 7.11 | 0.63 | 0 | 1.87E−04 | 4.19 | 18 |
| hsa-miR-422b | 8.56 | 7.80 | 8.42 | 0.44 | 100 | 8.12E−05 | 3.88 | 15 |
| hsa-miR-423 | 7.69 | 8.47 | 7.75 | 0.57 | 25 | 3.61E−03 | 1.91 | 4 |
| hsa-miR-424 | 2.74 | 3.15 | 2.33 | 0.73 | 0 | 8.66E−04 | 5.71 | 52 |
| hsa-miR-425- | 8.63 | 8.23 | 8.36 | 0.21 | 100 | 2.58E−05 | 2.10 | 4 |
| 5p | | | | | | | | |
| hsa-miR-429 | 1.84 | 3.82 | 2.77 | 1.09 | 0 | 8.85E−04 | 5.28 | 39 |
| hsa-miR-432 | 3.98 | 4.71 | 4.10 | 0.44 | 0 | 9.04E−04 | 2.58 | 6 |
| hsa-miR-451 | 8.24 | 6.92 | 7.85 | 0.71 | 100 | 5.71E−05 | 5.68 | 51 |
| hsa-miR-452 | 5.35 | 4.67 | 4.96 | 0.65 | 50 | 3.05E−05 | 5.58 | 48 |
| hsa-miR-452* | 5.83 | 2.33 | 2.94 | 2.13 | 25 | 1.44E−02 | 4.63 | 25 |
| hsa-miR-486 | 7.23 | 4.85 | 5.95 | 1.09 | 0 | 7.35E−04 | 5.37 | 41 |
| hsa-miR-487a | 4.65 | 4.38 | 4.88 | 0.52 | 100 | 4.21E−03 | 2.30 | 5 |
| hsa-miR-487b | 5.07 | 2.65 | 4.14 | 1.06 | 75 | 2.26E−03 | 4.76 | 27 |
| hsa-miR-489 | 1.98 | 2.79 | 2.38 | 0.70 | 0 | 9.64E−04 | 4.38 | 21 |
| hsa-miR-493- | 0.81 | 1.71 | 1.48 | 0.47 | 0 | 1.28E−02 | 3.41 | 11 |
| 5p | | | | | | | | |
| hsa-miR-495 | 1.84 | 2.79 | 2.40 | 0.43 | 0 | 9.20E−05 | 5.80 | 56 |
| hsa-miR-497 | 8.76 | 8.41 | 8.26 | 0.40 | 25 | 4.70E−05 | 4.10 | 17 |
| hsa-miR-500 | 7.19 | 7.40 | 7.21 | 0.13 | 100 | 8.65E−04 | 0.82 | 2 |
| hsa-miR-503 | 7.29 | 7.03 | 6.65 | 0.74 | 0 | 2.37E−02 | 1.69 | 3 |
| hsa-miR-505 | 6.57 | 5.51 | 5.14 | 1.14 | 25 | 4.51E−02 | 1.87 | 4 |
| hsa-miR-516- | 4.58 | 2.15 | 2.66 | 1.29 | 0 | 3.45E−02 | 2.70 | 7 |
| 5p | | | | | | | | |
| hsa-miR-517a | 2.98 | 1.94 | 2.92 | 0.80 | 0 | 6.63E−04 | 3.63 | 12 |
| hsa-miR-542- | 3.43 | 4.23 | 3.73 | 0.80 | 50 | 3.73E−02 | 2.21 | 5 |
| 3p | | | | | | | | |
| hsa-miR-542- | 0.81 | 0.89 | 1.55 | 0.89 | 0 | 1.36E−03 | 4.03 | 16 |
| 5p | | | | | | | | |
| hsa-miR-551b | 2.34 | 3.25 | 2.33 | 0.70 | 0 | 9.90E−05 | 5.91 | 60 |
| hsa-miR-557 | 8.59 | 8.73 | 8.60 | 0.12 | 100 | 3.90E−03 | 0.96 | 2 |
| hsa-miR-565 | 8.68 | 10.03 | 9.79 | 0.74 | 100 | 1.28E−02 | 1.83 | 4 |
| hsa-miR-566 | 8.95 | 8.47 | 8.97 | 0.39 | 25 | 2.56E−03 | −2.57 | 6 |
| hsa-miR-574 | 7.88 | 6.88 | 7.34 | 0.45 | 25 | 7.50E−04 | 2.13 | 4 |
| hsa-miR-583 | 4.41 | 5.09 | 3.78 | 1.16 | 25 | 7.88E−03 | 3.02 | 8 |
| hsa-miR-598 | 2.65 | 2.50 | 2.71 | 0.64 | 0 | 1.23E−03 | 3.23 | 9 |
| hsa-miR-624 | 1.69 | 3.34 | 2.65 | 0.75 | 0 | 3.65E−02 | 2.11 | 4 |
| hsa-miR-628 | 7.18 | 6.75 | 7.23 | 0.51 | 100 | 1.91E−02 | 1.20 | 2 |
| hsa-miR-630 | 2.45 | 3.04 | 2.91 | 0.34 | 0 | 3.34E−03 | 1.73 | 3 |
| hsa-miR-655 | 3.54 | 4.91 | 3.68 | 0.85 | 25 | 7.17E−03 | 2.21 | 5 |
| hsa-miR-660 | 4.77 | 6.49 | 6.12 | 0.91 | 100 | 2.33E−03 | 3.21 | 9 |
| hsa-miR-9* | 3.19 | 1.94 | 2.79 | 0.70 | 0 | 2.45E−02 | 1.99 | 4 |
| hsa-miR-92 | 11.79 | 11.42 | 11.36 | 0.32 | 100 | 3.18E−02 | 0.74 | 2 |
| hsa-miR-93 | 7.65 | 7.70 | 7.80 | 0.19 | 100 | 6.87E−06 | 3.13 | 9 |
| hsa-miR-96 | 2.34 | 1.94 | 2.16 | 0.18 | 0 | 2.23E−05 | 5.18 | 36 |
| hsa-miR-98 | 6.81 | 6.05 | 6.21 | 0.44 | 100 | 1.12E−04 | 4.15 | 18 |
| hsa-miR-99a | 9.97 | 9.91 | 9.69 | 0.30 | 100 | 8.36E−06 | 3.89 | 15 |
| hsa-miR-99b | 8.49 | 8.50 | 8.31 | 0.22 | 0 | 4.46E−06 | 3.03 | 8 |
| hsa-miR154 | 4.96 | 1.71 | 3.42 | 1.33 | 25 | 5.69E−04 | 6.48 | 89 |
| hsa-miR144 | 3.05 | 2.79 | 2.38 | 0.63 | 0 | 4.82E−05 | 5.48 | 45 |
| hsa-asg-9769 | 2.23 | 3.25 | 2.73 | 0.47 | 0 | 6.46E−04 | 2.43 | 5 |
| hsa-asg-9483 | 8.05 | 7.94 | 8.08 | 0.11 | 0 | 1.26E−04 | 2.30 | 5 |
| hsa-asg-9405 | 7.70 | 8.03 | 7.98 | 0.32 | 100 | 2.53E−04 | 3.16 | 9 |
| hsa-asg-9253 | 6.73 | 6.60 | 6.90 | 0.28 | 100 | 1.32E−05 | −4.37 | 21 |
| hsa-asg-9232 | 2.11 | 1.46 | 2.01 | 0.38 | 0 | 1.63E−04 | 3.18 | 9 |
| hsa-asg-9200 | 4.50 | 4.12 | 4.16 | 0.24 | 50 | 4.47E−04 | 1.79 | 3 |
| hsa-asg-9112 | 9.74 | 9.58 | 9.83 | 0.21 | 100 | 8.86E−06 | 2.79 | 7 |
| hsa-asg-8901 | 12.24 | 12.15 | 12.23 | 0.06 | 100 | 3.22E−04 | 1.40 | 3 |
| hsa-asg-860 | 2.34 | 2.65 | 2.65 | 0.27 | 0 | 3.55E−04 | 1.78 | 3 |
| hsa-asg-8195 | 7.36 | 7.49 | 7.49 | 0.58 | 100 | 4.07E−05 | −6.27 | 77 |
| hsa-asg-7985 | 10.23 | 10.13 | 10.39 | 0.26 | 100 | 3.26E−04 | 1.40 | 3 |
| hsa-asg-772 | 8.90 | 8.95 | 8.86 | 0.14 | 25 | 5.77E−04 | 1.05 | 2 |
| hsa-asg-7569 | 8.39 | 7.98 | 8.28 | 0.27 | 100 | 9.40E−04 | −1.68 | 3 |
| hsa-asg-7461 | 6.36 | 6.45 | 6.69 | 0.37 | 100 | 5.87E−04 | 1.79 | 3 |
| hsa-asg-7352 | 9.84 | 10.13 | 9.90 | 0.15 | 100 | 2.21E−04 | 1.37 | 3 |
| hsa-asg-7189 | 10.24 | 10.16 | 10.12 | 0.10 | 100 | 6.29E−05 | 1.77 | 3 |
| hsa-asg-7098 | 6.84 | 5.40 | 6.53 | 0.78 | 100 | 2.77E−04 | −4.89 | 30 |
| hsa-asg-6957 | 9.26 | 9.58 | 9.70 | 0.35 | 0 | 3.25E−04 | 1.95 | 4 |
| hsa-asg-6932 | 11.81 | 11.58 | 11.64 | 0.24 | 100 | 2.59E−04 | −1.45 | 3 |
| hsa-asg-6870 | 10.65 | 10.35 | 10.50 | 0.16 | 100 | 8.88E−04 | 1.27 | 2 |
| hsa-asg-680 | 5.75 | 7.15 | 6.91 | 0.79 | 100 | 4.84E−04 | 3.82 | 14 |
| hsa-asg-6457 | 3.59 | 2.92 | 3.32 | 0.29 | 0 | 5.86E−04 | 1.84 | 4 |
| hsa-asg-6247 | 9.96 | 10.02 | 9.88 | 0.38 | 100 | 9.38E−04 | 1.72 | 3 |
| hsa-asg-5998 | 8.89 | 8.98 | 9.13 | 0.27 | 75 | 5.94E−06 | 3.96 | 16 |
| hsa-asg-5932 | 12.92 | 12.77 | 12.98 | 0.17 | 100 | 7.04E−05 | 1.54 | 3 |
| hsa-asg-5760 | 5.68 | 5.93 | 6.09 | 0.77 | 100 | 2.90E−04 | −4.29 | 20 |
| hsa-asg-5021 | 1.98 | 1.46 | 2.03 | 0.47 | 0 | 1.70E−05 | 6.66 | 101 |
| hsa-asg-4557 | 3.90 | 3.44 | 3.55 | 0.28 | 0 | 2.19E−04 | 3.45 | 11 |
| hsa-asg-4523 | 7.14 | 7.28 | 7.29 | 0.17 | 0 | 1.89E−04 | 1.51 | 3 |
| hsa-asg-4515 | 2.98 | 2.15 | 2.38 | 0.41 | 0 | 4.54E−04 | 2.34 | 5 |
| hsa-asg-4416 | 2.74 | 2.15 | 2.25 | 0.38 | 0 | 8.12E−04 | 1.86 | 4 |
| hsa-asg-4350 | 5.16 | 5.07 | 5.51 | 0.49 | 100 | 2.39E−04 | −3.77 | 14 |
| hsa-asg-4163 | 4.13 | 3.82 | 3.73 | 0.31 | 0 | 4.68E−04 | 1.54 | 3 |
| hsa-asg-3998 | 8.44 | 8.22 | 8.37 | 0.27 | 100 | 7.50E−05 | 2.84 | 7 |
| hsa-asg-3811 | 7.32 | 8.42 | 7.77 | 0.48 | 100 | 9.02E−04 | 2.47 | 6 |
| hsa-asg-3604 | 3.73 | 4.18 | 3.65 | 0.41 | 25 | 6.14E−04 | 1.86 | 4 |
| hsa-asg-3545 | 11.15 | 10.69 | 10.99 | 0.21 | 100 | 2.79E−04 | 1.67 | 3 |
| hsa-asg-3167 | 10.19 | 10.08 | 10.19 | 0.19 | 100 | 9.23E−04 | 1.14 | 2 |
| hsa-asg-3138 | 7.86 | 7.90 | 8.07 | 0.33 | 100 | 2.06E−04 | 1.99 | 4 |
| hsa-asg-2944 | 3.25 | 3.44 | 3.14 | 0.29 | 0 | 3.88E−04 | 1.82 | 4 |
| hsa-asg-2824 | 11.26 | 11.01 | 11.17 | 0.11 | 100 | 1.99E−04 | −1.34 | 3 |
| hsa-asg-2785 | 9.77 | 9.64 | 9.83 | 0.18 | 100 | 4.65E−06 | 2.84 | 7 |
| hsa-asg-2750 | 12.35 | 12.19 | 12.19 | 0.12 | 75 | 6.41E−04 | 1.12 | 2 |
| hsa-asg-2739 | 10.12 | 9.93 | 10.20 | 0.24 | 100 | 2.23E−04 | 1.35 | 3 |
| hsa-asg-253 | 9.39 | 8.52 | 9.04 | 0.38 | 100 | 8.76E−04 | 1.69 | 3 |
| hsa-asg-2445 | 7.13 | 7.35 | 7.09 | 0.55 | 100 | 1.85E−04 | −5.31 | 40 |
| hsa-asg-2073 | 2.34 | 3.04 | 2.85 | 0.43 | 0 | 6.93E−04 | 2.06 | 4 |
| hsa-asg-1895 | 9.60 | 9.37 | 9.77 | 0.40 | 0 | 2.97E−04 | 2.34 | 5 |
| hsa-asg-1514 | 7.16 | 7.26 | 7.05 | 0.21 | 0 | 6.35E−04 | 1.70 | 3 |
| hsa-asg-1468 | 8.93 | 8.56 | 8.94 | 0.32 | 50 | 9.03E−04 | 1.60 | 3 |
| hsa-asg-14238 | 2.11 | 2.65 | 2.94 | 0.79 | 0 | 2.46E−04 | 4.94 | 31 |
| hsa-asg-14204 | 8.81 | 8.56 | 8.75 | 0.20 | 25 | 7.11E−04 | −1.12 | 2 |
| hsa-asg-14186 | 2.11 | 2.50 | 2.40 | 0.38 | 0 | 9.89E−04 | 2.42 | 5 |
| hsa-asg-14175 | 2.34 | 2.65 | 2.38 | 0.24 | 0 | 4.39E−04 | 3.88 | 15 |
| hsa-asg-14170 | 2.65 | 2.50 | 2.99 | 0.72 | 0 | 8.75E−05 | 5.40 | 42 |
| hsa-asg-14146 | 2.11 | 3.89 | 2.41 | 1.07 | 0 | 8.66E−04 | 4.64 | 25 |
| hsa-asg-14134 | 4.81 | 4.42 | 4.66 | 0.33 | 50 | 3.43E−05 | 4.11 | 17 |
| hsa-asg-14038 | 9.72 | 9.56 | 9.73 | 0.13 | 50 | 2.29E−04 | 2.38 | 5 |
| hsa-asg-13770 | 7.63 | 7.52 | 7.85 | 0.32 | 100 | 1.89E−04 | 1.97 | 4 |
| hsa-asg-13403 | 7.04 | 7.54 | 7.34 | 0.40 | 100 | 1.11E−04 | 2.79 | 7 |
| hsa-asg-13354 | 13.79 | 13.36 | 13.66 | 0.23 | 100 | 2.50E−04 | −2.12 | 4 |
| hsa-asg-13312 | 9.98 | 9.34 | 9.92 | 0.51 | 100 | 1.94E−04 | −4.79 | 28 |
| hsa-asg-13258 | 5.44 | 6.49 | 5.56 | 0.82 | 25 | 9.93E−04 | 3.54 | 12 |
| hsa-asg-13254 | 3.05 | 4.28 | 2.57 | 1.38 | 0 | 9.23E−04 | 6.10 | 69 |
| hsa-asg-13244 | 9.75 | 9.41 | 9.51 | 0.29 | 100 | 1.44E−04 | −1.86 | 4 |
| hsa-asg-13205 | 3.59 | 3.34 | 3.32 | 0.74 | 0 | 1.42E−04 | 5.26 | 38 |
| hsa-asg-13127 | 5.32 | 4.78 | 4.93 | 0.45 | 0 | 6.06E−04 | 2.52 | 6 |
| hsa-asg-12949 | 8.17 | 7.88 | 8.01 | 0.16 | 100 | 4.92E−04 | 1.37 | 3 |
| hsa-asg-12902 | 9.54 | 9.55 | 9.55 | 0.07 | 100 | 4.82E−04 | −1.87 | 4 |
| hsa-asg-12885 | 2.90 | 2.79 | 2.89 | 0.17 | 0 | 5.73E−06 | 2.02 | 4 |
| hsa-asg-12765 | 2.90 | 2.79 | 2.50 | 0.59 | 0 | 7.56E−04 | 2.67 | 6 |
| hsa-asg-12729 | 10.85 | 10.90 | 11.09 | 0.27 | 100 | 5.32E−05 | 2.40 | 5 |
| hsa-asg-12600 | 8.35 | 8.36 | 8.46 | 0.12 | 100 | 3.57E−04 | 1.06 | 2 |
| hsa-asg-12471 | 1.84 | 2.15 | 2.04 | 0.23 | 0 | 8.80E−05 | 1.56 | 3 |
| hsa-asg-12423 | 8.26 | 8.24 | 8.21 | 0.12 | 0 | 4.50E−04 | 1.11 | 2 |
| hsa-asg-12406 | 8.75 | 8.50 | 8.89 | 0.32 | 100 | 2.24E−04 | 2.71 | 7 |
| hsa-asg-12372 | 10.32 | 10.17 | 10.31 | 0.10 | 100 | 4.45E−06 | 1.93 | 4 |
| hsa-asg-12192 | 8.15 | 8.02 | 8.21 | 0.20 | 100 | 2.54E−04 | 1.44 | 3 |
| hsa-asg-11896 | 11.98 | 11.92 | 11.87 | 0.15 | 25 | 8.27E−04 | 1.30 | 2 |
| hsa-asg-11867 | 3.64 | 3.25 | 3.16 | 0.37 | 0 | 8.10E−04 | 1.62 | 3 |
| hsa-asg-11844 | 2.11 | 2.92 | 2.45 | 0.35 | 0 | 5.47E−04 | 1.74 | 3 |
| hsa-asg-11764 | 3.31 | 3.82 | 3.56 | 0.26 | 25 | 1.42E−04 | 1.61 | 3 |
| hsa-asg-11572 | 10.27 | 10.15 | 10.50 | 0.34 | 100 | 7.65E−04 | 1.76 | 3 |
| hsa-asg-11527 | 2.11 | 2.79 | 2.54 | 0.31 | 0 | 8.61E−04 | 1.67 | 3 |
| hsa-asg-11515 | 10.13 | 10.13 | 10.14 | 0.18 | 100 | 1.28E−04 | 2.10 | 4 |
| hsa-asg-11486 | 11.18 | 10.64 | 10.87 | 0.23 | 100 | 4.34E−04 | 1.65 | 3 |
| hsa-asg-11443 | 2.74 | 1.94 | 2.98 | 0.96 | 25 | 7.15E−04 | 4.94 | 31 |
| hsa-asg-11428 | 6.69 | 5.15 | 6.00 | 0.72 | 50 | 7.55E−04 | −4.34 | 20 |
| hsa-asg-114 | 7.42 | 6.99 | 7.38 | 0.30 | 0 | 1.85E−04 | 1.72 | 3 |
| hsa-asg-11373 | 9.60 | 9.62 | 9.44 | 0.20 | 50 | 4.34E−04 | 1.02 | 2 |
| hsa-asg-11199 | 9.96 | 9.76 | 9.75 | 0.30 | 75 | 3.70E−05 | 2.52 | 6 |
| hsa-asg-10981 | 3.54 | 3.34 | 3.34 | 0.17 | 0 | 1.17E−04 | 1.39 | 3 |
| hsa-asg-10883 | 5.12 | 4.78 | 4.36 | 0.72 | 0 | 3.37E−04 | 4.21 | 18 |
| hsa-asg-10577 | 10.25 | 10.52 | 10.59 | 0.26 | 100 | 5.68E−05 | 2.07 | 4 |
| hsa-asg-10473 | 1.69 | 2.33 | 2.33 | 0.45 | 0 | 6.68E−04 | 2.43 | 5 |
| hsa-asg-10409 | 3.19 | 3.15 | 2.95 | 0.27 | 0 | 7.40E−04 | 1.30 | 2 |
| hsa-asg-10401 | 3.73 | 2.92 | 3.23 | 0.35 | 0 | 7.24E−04 | 1.73 | 3 |
| hsa-asg-10154 | 8.42 | 9.31 | 9.09 | 0.59 | 0 | 5.46E−04 | 2.82 | 7 |
| hsa-asg-10113 | 2.11 | 2.50 | 2.01 | 0.38 | 0 | 8.42E−04 | 2.23 | 5 |
| hsa-asg-10065 | 2.11 | 2.50 | 2.34 | 0.18 | 0 | 2.74E−04 | 1.80 | 3 |
| hsa-miR257 | 5.73 | 4.47 | 4.23 | 1.28 | 75 | 2.37E−03 | 4.57 | 24 |
| hsa-miR229 | 2.98 | 2.15 | 2.43 | 0.37 | 0 | 2.73E−02 | 0.79 | 2 |
| hsa-miR223 | 8.81 | 8.99 | 8.77 | 0.17 | 100 | 1.92E−03 | −1.00 | 2 |
| hsa-miR207 | 8.31 | 8.51 | 7.91 | 0.59 | 50 | 2.06E−02 | 1.18 | 2 |
| hsa-miR189 | 7.59 | 7.12 | 7.56 | 0.40 | 0 | 1.66E−02 | 0.97 | 2 |
| hsa-miR166 | 7.36 | 7.32 | 7.21 | 0.22 | 25 | 3.98E−02 | 0.40 | 1 |
| hsa-miR157 | 8.09 | 7.17 | 6.87 | 0.96 | 75 | 2.37E−02 | 2.21 | 5 |
| hsa-miR120 | 2.34 | 2.15 | 2.27 | 0.09 | 0 | 1.83E−02 | −0.42 | 1 |
| hsa-miR102 | 7.04 | 7.33 | 6.69 | 0.59 | 100 | 1.42E−02 | 1.39 | 3 |
| hsa-asg-999 | 5.73 | 6.57 | 6.23 | 0.36 | 100 | 4.23E−02 | 1.26 | 2 |
| hsa-asg-9927 | 6.16 | 5.67 | 6.39 | 0.59 | 100 | 1.36E−03 | −2.51 | 6 |
| hsa-asg-9886 | 8.34 | 8.19 | 8.36 | 0.22 | 100 | 1.96E−02 | 0.47 | 1 |
| hsa-asg-9880 | 11.28 | 11.33 | 11.16 | 0.22 | 0 | 1.48E−02 | 0.53 | 1 |
| hsa-asg-9874 | 12.54 | 12.42 | 12.53 | 0.09 | 100 | 1.25E−02 | 0.61 | 2 |
| hsa-asg-9858 | 7.52 | 6.35 | 7.27 | 0.83 | 25 | 1.80E−02 | 1.74 | 3 |
| hsa-asg-9845 | 4.02 | 3.82 | 4.96 | 1.28 | 50 | 2.84E−02 | −2.63 | 6 |
| hsa-asg-9735 | 5.99 | 5.38 | 5.95 | 0.50 | 100 | 4.76E−02 | 0.83 | 2 |
| hsa-asg-9729 | 6.33 | 8.52 | 7.72 | 0.96 | 100 | 4.84E−02 | 1.48 | 3 |
| hsa-asg-9714 | 4.29 | 5.33 | 4.00 | 1.03 | 25 | 2.27E−02 | −1.98 | 4 |
| hsa-asg-9696 | 2.34 | 4.12 | 3.43 | 1.08 | 0 | 1.06E−02 | 3.22 | 9 |
| hsa-asg-9665 | 12.34 | 12.14 | 12.32 | 0.12 | 100 | 2.85E−03 | −0.70 | 2 |
| hsa-asg-9649 | 6.26 | 4.59 | 6.21 | 1.16 | 75 | 3.77E−03 | −4.25 | 19 |
| hsa-asg-9625 | 10.92 | 10.68 | 10.81 | 0.31 | 100 | 2.44E−02 | −0.68 | 2 |
| hsa-asg-9610 | 2.90 | 3.25 | 3.84 | 0.90 | 50 | 2.72E−02 | −1.66 | 3 |
| hsa-asg-9575 | 3.90 | 2.79 | 3.50 | 0.66 | 25 | 4.73E−02 | 1.58 | 3 |
| hsa-asg-9573 | 5.27 | 4.55 | 5.39 | 0.66 | 100 | 2.95E−02 | 1.75 | 3 |
| hsa-asg-9569 | 1.84 | 2.15 | 1.98 | 0.31 | 0 | 1.04E−02 | −0.94 | 2 |
| hsa-asg-9562 | 3.05 | 3.52 | 2.99 | 0.50 | 0 | 2.13E−03 | 2.10 | 4 |
| hsa-asg-9559 | 4.83 | 4.51 | 4.36 | 0.47 | 0 | 3.25E−03 | 1.66 | 3 |
| hsa-asg-9547 | 6.61 | 6.88 | 6.68 | 0.16 | 100 | 4.99E−02 | −0.37 | 1 |
| hsa-asg-9530 | 12.67 | 12.64 | 12.65 | 0.01 | 100 | 1.82E−04 | 0.79 | 2 |
| hsa-asg-9521 | 2.90 | 2.15 | 2.30 | 0.40 | 0 | 2.67E−02 | 1.35 | 3 |
| hsa-asg-9508 | 11.09 | 11.07 | 10.92 | 0.41 | 0 | 3.33E−03 | 1.37 | 3 |
| hsa-asg-9503 | 12.56 | 12.42 | 12.52 | 0.09 | 100 | 6.76E−03 | −0.29 | 1 |
| hsa-asg-9486 | 6.09 | 5.63 | 5.60 | 0.44 | 50 | 3.42E−02 | −1.56 | 3 |
| hsa-asg-9476 | 4.16 | 5.80 | 5.35 | 1.00 | 50 | 9.15E−03 | −2.84 | 7 |
| hsa-asg-9457 | 12.37 | 12.23 | 12.34 | 0.08 | 100 | 2.70E−04 | −0.45 | 1 |
| hsa-asg-9434 | 8.67 | 8.43 | 8.62 | 0.13 | 0 | 1.86E−02 | 0.40 | 1 |
| hsa-asg-9411 | 2.74 | 3.60 | 3.09 | 0.37 | 0 | 8.31E−03 | 1.35 | 3 |
| hsa-asg-9368 | 6.51 | 7.24 | 7.17 | 0.45 | 0 | 3.14E−03 | 1.69 | 3 |
| hsa-asg-9332 | 9.52 | 9.14 | 9.46 | 0.23 | 100 | 3.96E−02 | 0.37 | 1 |
| hsa-asg-9319 | 7.07 | 6.66 | 7.14 | 0.37 | 100 | 1.07E−02 | 0.98 | 2 |
| hsa-asg-9297 | 3.31 | 4.12 | 3.55 | 0.42 | 0 | 3.39E−02 | 1.74 | 3 |
| hsa-asg-9273 | 11.59 | 11.57 | 11.63 | 0.10 | 100 | 2.03E−02 | −0.29 | 1 |
| hsa-asg-925 | 3.90 | 5.76 | 4.57 | 1.19 | 50 | 2.60E−02 | 2.22 | 5 |
| hsa-asg-9248 | 10.19 | 10.38 | 10.28 | 0.09 | 100 | 1.27E−02 | −0.22 | 1 |
| hsa-asg-924 | 2.65 | 3.15 | 2.17 | 0.92 | 0 | 3.20E−03 | 4.76 | 27 |
| hsa-asg-922 | 6.06 | 4.95 | 4.76 | 1.28 | 25 | 1.75E−02 | 2.69 | 6 |
| hsa-asg-9212 | 8.91 | 8.32 | 8.81 | 0.34 | 100 | 2.34E−03 | −6.63 | 99 |
| hsa-asg-916 | 9.78 | 10.01 | 9.94 | 0.16 | 100 | 1.97E−02 | 0.78 | 2 |
| hsa-asg-914 | 10.11 | 10.21 | 10.09 | 0.25 | 100 | 4.67E−02 | 0.47 | 1 |
| hsa-asg-9128 | 8.19 | 7.28 | 7.72 | 0.38 | 100 | 2.21E−02 | 0.76 | 2 |
| hsa-asg-9120 | 8.29 | 8.69 | 8.51 | 0.20 | 25 | 2.57E−02 | 0.71 | 2 |
| hsa-asg-9099 | 5.26 | 5.25 | 5.25 | 0.25 | 0 | 1.14E−02 | 1.17 | 2 |
| hsa-asg-9092 | 13.01 | 12.74 | 12.83 | 0.21 | 100 | 2.49E−02 | −0.41 | 1 |
| hsa-asg-9082 | 4.29 | 5.49 | 4.91 | 1.41 | 0 | 3.37E−02 | 2.61 | 6 |
| hsa-asg-9060 | 7.22 | 6.57 | 7.22 | 0.52 | 0 | 3.60E−02 | 0.92 | 2 |
| hsa-asg-9052 | 8.32 | 8.72 | 8.80 | 0.37 | 50 | 5.71E−03 | −1.10 | 2 |
| hsa-asg-9025 | 6.40 | 6.68 | 6.91 | 0.45 | 100 | 2.24E−02 | 0.99 | 2 |
| hsa-asg-9008 | 2.82 | 5.09 | 4.26 | 1.06 | 0 | 2.55E−02 | −2.70 | 7 |
| hsa-asg-9004 | 7.92 | 8.35 | 8.40 | 0.35 | 100 | 3.78E−03 | 1.50 | 3 |
| hsa-asg-8972 | 3.12 | 4.78 | 3.63 | 1.27 | 0 | 1.22E−02 | 2.91 | 8 |
| hsa-asg-8970 | 5.37 | 6.53 | 6.29 | 0.62 | 75 | 1.99E−02 | −1.27 | 2 |
| hsa-asg-8957 | 9.42 | 9.37 | 9.48 | 0.11 | 100 | 1.06E−02 | 0.48 | 1 |
| hsa-asg-8955 | 3.64 | 5.15 | 4.15 | 2.04 | 25 | 1.77E−02 | 4.38 | 21 |
| hsa-asg-8953 | 10.62 | 10.39 | 10.48 | 0.15 | 100 | 8.10E−04 | 0.86 | 2 |
| hsa-asg-8928 | 7.91 | 8.25 | 8.12 | 0.16 | 0 | 5.16E−03 | 0.54 | 1 |
| hsa-asg-8925 | 7.86 | 7.88 | 8.27 | 0.64 | 0 | 3.23E−02 | −5.81 | 56 |
| hsa-asg-8889 | 3.64 | 2.50 | 3.65 | 0.82 | 0 | 7.43E−03 | 2.46 | 6 |
| hsa-asg-8882 | 5.23 | 5.76 | 5.60 | 0.44 | 50 | 4.54E−02 | 1.39 | 3 |
| hsa-asg-8878 | 9.58 | 9.38 | 9.73 | 0.34 | 100 | 1.91E−03 | 1.23 | 2 |
| hsa-asg-8872 | 9.81 | 9.34 | 9.80 | 0.33 | 100 | 3.64E−03 | −1.09 | 2 |
| hsa-asg-8770 | 4.32 | 4.33 | 4.10 | 0.39 | 75 | 2.17E−02 | 1.40 | 3 |
| hsa-asg-8757 | 4.50 | 5.85 | 4.95 | 0.77 | 0 | 1.73E−03 | −3.01 | 8 |
| hsa-asg-8699 | 4.74 | 5.95 | 5.74 | 0.67 | 25 | 1.37E−02 | −1.61 | 3 |
| hsa-asg-8687 | 8.24 | 9.08 | 8.73 | 0.38 | 25 | 4.38E−02 | 0.86 | 2 |
| hsa-asg-8670 | 3.78 | 2.33 | 3.19 | 0.77 | 0 | 3.83E−02 | −1.30 | 2 |
| hsa-asg-8642 | 4.65 | 3.44 | 4.18 | 0.55 | 0 | 3.51E−02 | 1.27 | 2 |
| hsa-asg-8623 | 9.63 | 9.45 | 9.60 | 0.12 | 100 | 4.02E−02 | 0.36 | 1 |
| hsa-asg-8617 | 10.26 | 9.76 | 10.10 | 0.36 | 100 | 8.61E−03 | 1.15 | 2 |
| hsa-asg-8607 | 9.35 | 9.80 | 9.61 | 0.19 | 75 | 9.39E−03 | 0.71 | 2 |
| hsa-asg-8602 | 7.84 | 7.75 | 7.74 | 0.08 | 50 | 1.83E−02 | −0.37 | 1 |
| hsa-asg-8579 | 3.31 | 3.52 | 3.03 | 0.48 | 0 | 1.12E−02 | 1.69 | 3 |
| hsa-asg-8576 | 11.76 | 11.57 | 11.77 | 0.15 | 100 | 2.75E−02 | 0.31 | 1 |
| hsa-asg-8520 | 10.52 | 10.42 | 10.51 | 0.09 | 100 | 3.12E−02 | 0.35 | 1 |
| hsa-asg-8518 | 7.73 | 7.80 | 7.76 | 0.38 | 100 | 2.60E−03 | 1.30 | 2 |
| hsa-asg-8515 | 11.31 | 11.16 | 11.24 | 0.07 | 100 | 9.99E−04 | −0.50 | 1 |
| hsa-asg-8510 | 10.06 | 10.10 | 10.10 | 0.13 | 100 | 6.21E−03 | 0.52 | 1 |
| hsa-asg-8459 | 8.81 | 8.53 | 8.72 | 0.13 | 100 | 3.21E−02 | 0.63 | 2 |
| hsa-asg-8454 | 4.38 | 3.82 | 3.99 | 0.40 | 50 | 1.20E−03 | 1.79 | 3 |
| hsa-asg-8450 | 11.70 | 11.32 | 11.65 | 0.24 | 100 | 1.06E−03 | −1.06 | 2 |
| hsa-asg-8444 | 6.96 | 6.90 | 6.84 | 0.38 | 100 | 3.39E−03 | 1.59 | 3 |
| hsa-asg-8421 | 10.74 | 10.91 | 10.89 | 0.12 | 100 | 4.19E−03 | 0.46 | 1 |
| hsa-asg-8411 | 4.98 | 2.15 | 3.89 | 1.34 | 50 | 3.83E−02 | 2.41 | 5 |
| hsa-asg-8391 | 6.86 | 6.43 | 6.82 | 0.32 | 100 | 3.56E−03 | 1.34 | 3 |
| hsa-asg-8379 | 3.82 | 5.55 | 4.67 | 0.89 | 0 | 8.13E−03 | 2.44 | 5 |
| hsa-asg-8357 | 2.74 | 2.33 | 2.40 | 0.40 | 0 | 3.57E−03 | 1.69 | 3 |
| hsa-asg-8300 | 2.74 | 2.79 | 3.41 | 0.82 | 0 | 4.19E−02 | 2.19 | 5 |
| hsa-asg-8297 | 3.31 | 3.52 | 3.35 | 0.17 | 0 | 1.02E−02 | 1.19 | 2 |
| hsa-asg-8282 | 5.94 | 4.18 | 5.58 | 0.94 | 75 | 2.06E−02 | −1.87 | 4 |
| hsa-asg-8280 | 3.37 | 6.27 | 5.64 | 1.57 | 75 | 2.79E−02 | −3.40 | 11 |
| hsa-asg-8257 | 6.03 | 6.75 | 6.55 | 0.44 | 100 | 1.80E−03 | 1.97 | 4 |
| hsa-asg-8253 | 10.97 | 11.11 | 11.15 | 0.15 | 100 | 1.17E−03 | 0.79 | 2 |
| hsa-asg-8227 | 9.82 | 9.73 | 9.68 | 0.12 | 100 | 3.81E−02 | 0.34 | 1 |
| hsa-asg-8221 | 9.66 | 9.37 | 9.66 | 0.21 | 100 | 5.44E−03 | 1.19 | 2 |
| hsa-asg-8197 | 5.21 | 5.38 | 5.25 | 0.12 | 0 | 3.62E−03 | 0.83 | 2 |
| hsa-asg-8163 | 12.82 | 12.64 | 12.80 | 0.15 | 100 | 2.20E−03 | −0.59 | 2 |
| hsa-asg-8137 | 5.57 | 5.15 | 5.72 | 0.45 | 75 | 9.62E−03 | 1.75 | 3 |
| hsa-asg-8130 | 7.01 | 6.80 | 7.30 | 0.61 | 25 | 2.25E−02 | −5.97 | 63 |
| hsa-asg-8121 | 7.40 | 7.09 | 7.40 | 0.27 | 0 | 9.53E−03 | 0.74 | 2 |
| hsa-asg-8099 | 5.01 | 5.83 | 5.17 | 0.48 | 25 | 1.95E−02 | −2.34 | 5 |
| hsa-asg-8084 | 2.34 | 1.94 | 2.11 | 0.17 | 0 | 2.39E−02 | −0.52 | 1 |
| hsa-asg-8055 | 2.98 | 2.15 | 2.14 | 0.60 | 0 | 7.15E−03 | 3.03 | 8 |
| hsa-asg-8054 | 2.74 | 1.46 | 2.04 | 0.53 | 0 | 4.23E−03 | 1.82 | 4 |
| hsa-asg-8042 | 10.85 | 10.41 | 10.84 | 0.30 | 100 | 1.36E−03 | −1.97 | 4 |
| hsa-asg-8036 | 5.96 | 2.50 | 4.44 | 1.43 | 25 | 3.55E−02 | 2.50 | 6 |
| hsa-asg-8002 | 7.60 | 7.63 | 7.55 | 0.77 | 100 | 6.94E−03 | 2.33 | 5 |
| hsa-asg-7973 | 9.20 | 8.83 | 8.96 | 0.19 | 100 | 5.21E−03 | 1.04 | 2 |
| hsa-asg-7964 | 7.90 | 6.92 | 7.16 | 0.57 | 100 | 1.76E−02 | −1.52 | 3 |
| hsa-asg-7952 | 4.09 | 4.01 | 3.52 | 0.83 | 0 | 8.89E−03 | −2.15 | 4 |
| hsa-asg-7939 | 13.93 | 13.78 | 13.96 | 0.15 | 100 | 1.86E−02 | −0.33 | 1 |
| hsa-asg-7930 | 8.84 | 8.95 | 9.11 | 0.39 | 100 | 1.28E−02 | −0.91 | 2 |
| hsa-asg-791 | 2.45 | 1.71 | 2.22 | 0.55 | 0 | 7.38E−03 | 2.07 | 4 |
| hsa-asg-7900 | 9.00 | 8.33 | 8.50 | 0.43 | 75 | 5.28E−03 | 1.63 | 3 |
| hsa-asg-7859 | 11.76 | 11.35 | 11.56 | 0.18 | 0 | 3.75E−03 | 0.59 | 2 |
| hsa-asg-7777 | 7.73 | 7.97 | 7.83 | 0.13 | 0 | 2.83E−03 | 1.34 | 3 |
| hsa-asg-7770 | 6.56 | 7.23 | 6.94 | 0.28 | 100 | 1.30E−03 | 2.38 | 5 |
| hsa-asg-7753 | 12.94 | 12.60 | 12.81 | 0.15 | 100 | 8.66E−03 | −0.46 | 1 |
| hsa-asg-7751 | 2.65 | 3.75 | 3.32 | 0.50 | 0 | 8.43E−03 | 2.78 | 7 |
| hsa-asg-7749 | 8.43 | 8.77 | 8.50 | 0.34 | 75 | 4.75E−02 | −0.64 | 2 |
| hsa-asg-773 | 9.15 | 8.98 | 9.31 | 0.41 | 50 | 2.57E−03 | 1.61 | 3 |
| hsa-asg-7721 | 6.43 | 6.14 | 6.65 | 0.47 | 0 | 1.66E−03 | 1.93 | 4 |
| hsa-asg-7704 | 7.48 | 7.38 | 7.61 | 0.22 | 100 | 1.09E−02 | 0.83 | 2 |
| hsa-asg-7690 | 5.64 | 4.88 | 5.32 | 0.32 | 100 | 3.98E−02 | −0.65 | 2 |
| hsa-asg-7688 | 3.05 | 3.60 | 2.90 | 0.56 | 25 | 2.99E−03 | 1.98 | 4 |
| hsa-asg-7684 | 2.82 | 5.67 | 5.19 | 1.92 | 75 | 3.87E−02 | −3.17 | 9 |
| hsa-asg-7667 | 11.65 | 11.41 | 11.58 | 0.11 | 100 | 1.98E−03 | 0.49 | 1 |
| hsa-asg-7651 | 9.52 | 9.00 | 9.47 | 0.32 | 100 | 1.58E−02 | 0.69 | 2 |
| hsa-asg-7640 | 9.19 | 9.07 | 9.15 | 0.10 | 50 | 5.19E−03 | −0.28 | 1 |
| hsa-asg-7637 | 5.05 | 4.33 | 4.09 | 1.31 | 0 | 1.65E−02 | 2.99 | 8 |
| hsa-asg-7617 | 9.55 | 9.59 | 9.51 | 0.07 | 75 | 3.19E−03 | −0.75 | 2 |
| hsa-asg-7585 | 6.40 | 6.60 | 6.79 | 0.35 | 100 | 1.13E−02 | −1.09 | 2 |
| hsa-asg-7579 | 8.41 | 8.20 | 8.36 | 0.13 | 100 | 1.08E−02 | −0.41 | 1 |
| hsa-asg-7564 | 5.55 | 6.46 | 6.28 | 0.49 | 100 | 4.70E−02 | 1.21 | 2 |
| hsa-asg-7540 | 7.50 | 7.02 | 7.48 | 0.40 | 100 | 4.46E−02 | −0.90 | 2 |
| hsa-asg-7532 | 5.61 | 5.83 | 5.37 | 0.42 | 25 | 3.69E−03 | 1.39 | 3 |
| hsa-asg-7514 | 11.56 | 11.41 | 11.57 | 0.17 | 100 | 3.87E−02 | −0.31 | 1 |
| hsa-asg-7510 | 10.56 | 10.56 | 10.63 | 0.09 | 100 | 2.94E−02 | 0.53 | 1 |
| hsa-asg-7491 | 8.53 | 8.20 | 8.65 | 0.46 | 25 | 4.45E−02 | 0.88 | 2 |
| hsa-asg-7487 | 6.48 | 5.76 | 6.43 | 0.65 | 100 | 4.35E−02 | 1.27 | 2 |
| hsa-asg-7478 | 3.19 | 2.79 | 3.06 | 0.21 | 0 | 5.81E−03 | 1.28 | 2 |
| hsa-asg-7471 | 1.53 | 3.04 | 3.26 | 1.40 | 0 | 4.54E−02 | 2.40 | 5 |
| hsa-asg-7465 | 2.45 | 1.94 | 2.73 | 0.84 | 0 | 3.09E−03 | 3.90 | 15 |
| hsa-asg-7463 | 7.27 | 7.42 | 7.26 | 0.26 | 25 | 2.38E−02 | 0.68 | 2 |
| hsa-asg-7458 | 2.90 | 2.65 | 3.95 | 1.36 | 50 | 3.89E−02 | −2.47 | 6 |
| hsa-asg-744 | 12.12 | 11.68 | 11.85 | 0.21 | 100 | 2.03E−02 | 0.61 | 2 |
| hsa-asg-7428 | 10.54 | 10.07 | 10.40 | 0.23 | 100 | 1.64E−03 | 0.85 | 2 |
| hsa-asg-7426 | 8.78 | 8.82 | 8.95 | 0.25 | 100 | 3.29E−03 | 0.86 | 2 |
| hsa-asg-7424 | 8.31 | 8.03 | 8.04 | 0.20 | 0 | 4.60E−02 | −0.67 | 2 |
| hsa-asg-7423 | 1.84 | 2.92 | 2.26 | 0.46 | 0 | 1.74E−02 | 2.48 | 6 |
| hsa-asg-7410 | 7.71 | 7.58 | 7.85 | 0.24 | 100 | 6.31E−03 | 0.72 | 2 |
| hsa-asg-7400 | 11.34 | 11.51 | 11.32 | 0.13 | 0 | 1.43E−03 | 0.81 | 2 |
| hsa-asg-7367 | 2.11 | 1.46 | 1.87 | 0.30 | 0 | 4.24E−02 | 0.72 | 2 |
| hsa-asg-7363 | 0.81 | 2.15 | 1.85 | 0.86 | 0 | 8.72E−03 | 2.18 | 5 |
| hsa-asg-7319 | 2.11 | 2.50 | 2.56 | 0.42 | 25 | 8.46E−03 | 1.08 | 2 |
| hsa-asg-7314 | 5.35 | 5.76 | 5.40 | 0.68 | 75 | 2.84E−02 | −2.02 | 4 |
| hsa-asg-7302 | 2.55 | 2.33 | 2.05 | 0.58 | 0 | 4.68E−03 | 1.90 | 4 |
| hsa-asg-730 | 10.26 | 10.07 | 10.32 | 0.23 | 100 | 3.32E−02 | −0.43 | 1 |
| hsa-asg-7292 | 10.11 | 9.72 | 9.83 | 0.21 | 100 | 1.40E−02 | 0.64 | 2 |
| hsa-asg-7281 | 3.19 | 2.15 | 2.56 | 0.46 | 0 | 3.65E−03 | 1.66 | 3 |
| hsa-asg-7258 | 6.75 | 5.53 | 6.47 | 0.63 | 75 | 3.16E−02 | −2.50 | 6 |
| hsa-asg-7252 | 3.98 | 4.01 | 4.05 | 0.11 | 0 | 3.48E−02 | 0.24 | 1 |
| hsa-asg-7239 | 3.54 | 3.25 | 3.13 | 0.33 | 0 | 2.21E−03 | 1.43 | 3 |
| hsa-asg-723 | 3.31 | 3.04 | 2.73 | 0.52 | 0 | 1.38E−02 | 1.23 | 2 |
| hsa-asg-7224 | 8.19 | 8.34 | 8.50 | 0.29 | 0 | 5.64E−03 | 0.80 | 2 |
| hsa-asg-7221 | 9.37 | 9.33 | 9.52 | 0.20 | 100 | 2.00E−03 | 0.92 | 2 |
| hsa-asg-7217 | 10.96 | 11.37 | 11.12 | 0.18 | 0 | 1.54E−02 | 0.43 | 1 |
| hsa-asg-7201 | 7.91 | 8.07 | 7.83 | 0.19 | 100 | 1.38E−02 | 0.48 | 1 |
| hsa-asg-7200 | 10.21 | 9.84 | 9.97 | 0.17 | 100 | 4.59E−02 | 0.30 | 1 |
| hsa-asg-7199 | 9.68 | 9.35 | 9.63 | 0.23 | 100 | 1.37E−02 | 0.77 | 2 |
| hsa-asg-7175 | 13.70 | 13.49 | 13.62 | 0.17 | 100 | 2.84E−02 | −0.39 | 1 |
| hsa-asg-7173 | 10.27 | 9.93 | 10.10 | 0.14 | 100 | 3.81E−02 | −0.43 | 1 |
| hsa-asg-7097 | 11.61 | 11.55 | 11.48 | 0.12 | 0 | 2.05E−02 | 0.26 | 1 |
| hsa-asg-7096 | 12.95 | 12.80 | 12.92 | 0.17 | 100 | 2.73E−02 | −0.38 | 1 |
| hsa-asg-7070 | 9.73 | 9.99 | 9.79 | 0.14 | 100 | 3.22E−02 | −0.52 | 1 |
| hsa-asg-7062 | 8.98 | 9.04 | 8.92 | 0.11 | 100 | 1.27E−02 | −0.80 | 2 |
| hsa-asg-7025 | 10.79 | 10.72 | 10.57 | 0.30 | 100 | 1.92E−02 | 0.65 | 2 |
| hsa-asg-7009 | 8.61 | 8.02 | 8.42 | 0.30 | 100 | 3.30E−03 | 1.04 | 2 |
| hsa-asg-6926 | 4.02 | 4.33 | 3.98 | 0.26 | 0 | 1.63E−02 | 1.22 | 2 |
| hsa-asg-6922 | 1.69 | 2.50 | 1.77 | 0.51 | 0 | 3.89E−02 | 1.26 | 2 |
| hsa-asg-6910 | 8.98 | 9.23 | 8.61 | 0.80 | 100 | 2.82E−02 | 1.46 | 3 |
| hsa-asg-6898 | 2.90 | 3.04 | 2.88 | 0.30 | 0 | 8.33E−03 | 1.32 | 2 |
| hsa-asg-6883 | 2.98 | 3.04 | 2.64 | 0.45 | 0 | 1.33E−02 | 2.04 | 4 |
| hsa-asg-6860 | 9.66 | 9.79 | 9.74 | 0.10 | 100 | 1.30E−04 | 0.93 | 2 |
| hsa-asg-6856 | 3.94 | 3.52 | 3.90 | 0.32 | 0 | 1.67E−02 | 0.74 | 2 |
| hsa-asg-6831 | 10.44 | 10.16 | 10.31 | 0.16 | 100 | 9.19E−04 | −0.66 | 2 |
| hsa-asg-6823 | 7.46 | 5.30 | 6.65 | 0.94 | 75 | 4.06E−02 | 1.58 | 3 |
| hsa-asg-682 | 6.89 | 7.06 | 6.92 | 0.13 | 100 | 2.78E−02 | 0.67 | 2 |
| hsa-asg-6782 | 6.61 | 6.56 | 6.57 | 0.32 | 75 | 4.53E−02 | 0.52 | 1 |
| hsa-asg-6754 | 6.18 | 4.98 | 6.05 | 0.77 | 0 | 4.50E−02 | −1.51 | 3 |
| hsa-asg-6733 | 3.64 | 3.68 | 3.58 | 0.61 | 25 | 1.75E−02 | 1.27 | 2 |
| hsa-asg-6729 | 7.32 | 6.79 | 7.54 | 0.61 | 100 | 9.01E−03 | 1.83 | 4 |
| hsa-asg-6728 | 10.65 | 10.26 | 10.69 | 0.41 | 100 | 4.24E−02 | −0.69 | 2 |
| hsa-asg-6633 | 4.70 | 5.18 | 4.68 | 0.37 | 0 | 3.55E−02 | 1.10 | 2 |
| hsa-asg-657 | 7.84 | 7.60 | 7.73 | 0.29 | 0 | 7.60E−03 | 1.32 | 2 |
| hsa-asg-6569 | 6.11 | 6.93 | 6.31 | 0.46 | 75 | 1.76E−02 | 1.13 | 2 |
| hsa-asg-6532 | 3.05 | 4.18 | 3.34 | 0.56 | 25 | 4.69E−02 | 1.06 | 2 |
| hsa-asg- | 12.37 | 12.04 | 12.29 | 0.20 | 100 | 1.09E−03 | −0.84 | 2 |
| 6507_st2 | | | | | | | | |
| hsa-asg-6500 | 7.83 | 7.48 | 7.83 | 0.27 | 100 | 1.67E−02 | 0.76 | 2 |
| hsa-asg-6466 | 12.35 | 12.06 | 12.10 | 0.24 | 75 | 4.21E−02 | −0.38 | 1 |
| hsa-asg-644 | 6.07 | 6.38 | 5.87 | 0.79 | 75 | 3.54E−02 | 1.76 | 3 |
| hsa-asg-6412 | 8.43 | 8.33 | 8.35 | 0.50 | 25 | 4.60E−02 | 0.92 | 2 |
| hsa-asg-641 | 2.11 | 2.65 | 2.14 | 0.46 | 0 | 1.31E−02 | 1.46 | 3 |
| hsa-asg-6383 | 8.01 | 8.24 | 8.23 | 0.16 | 0 | 4.36E−03 | 1.06 | 2 |
| hsa-asg-6371 | 10.62 | 10.97 | 10.84 | 0.16 | 100 | 1.98E−02 | 0.44 | 1 |
| hsa-asg-6341 | 13.64 | 13.38 | 13.58 | 0.15 | 100 | 1.64E−03 | −0.79 | 2 |
| hsa-asg-6331 | 7.77 | 8.22 | 8.11 | 0.24 | 100 | 2.02E−02 | 0.53 | 1 |
| hsa-asg-6239 | 1.69 | 2.15 | 1.74 | 0.50 | 0 | 2.59E−02 | 1.15 | 2 |
| hsa-asg-6203 | 11.78 | 11.46 | 11.68 | 0.21 | 100 | 4.58E−03 | −0.70 | 2 |
| hsa-asg-6202 | 8.02 | 8.43 | 8.07 | 0.25 | 50 | 2.25E−02 | 0.56 | 1 |
| hsa-asg-6186 | 3.54 | 4.81 | 4.13 | 0.54 | 0 | 1.78E−02 | 1.90 | 4 |
| hsa-asg-6180 | 11.04 | 10.70 | 11.01 | 0.29 | 100 | 6.95E−03 | 0.76 | 2 |
| hsa-asg-6168 | 3.43 | 2.33 | 2.80 | 0.46 | 0 | 2.41E−02 | −0.89 | 2 |
| hsa-asg-6165 | 3.48 | 4.18 | 4.14 | 0.47 | 25 | 2.61E−02 | −1.66 | 3 |
| hsa-asg-6149 | 9.70 | 9.87 | 9.76 | 0.10 | 75 | 1.50E−04 | 0.81 | 2 |
| hsa-asg-6138 | 6.91 | 6.01 | 5.46 | 1.29 | 50 | 3.66E−02 | 2.31 | 5 |
| hsa-asg-6116 | 5.45 | 4.33 | 3.99 | 1.15 | 50 | 2.45E−02 | −2.17 | 5 |
| hsa-asg-6092 | 12.23 | 12.01 | 12.13 | 0.11 | 100 | 4.09E−04 | −0.66 | 2 |
| hsa-asg-6071 | 6.82 | 6.57 | 6.72 | 0.11 | 100 | 1.70E−03 | −1.31 | 2 |
| hsa-asg-6021 | 9.26 | 9.20 | 9.36 | 0.15 | 50 | 2.13E−02 | 0.39 | 1 |
| hsa-asg-6019 | 7.01 | 7.80 | 7.84 | 0.64 | 50 | 4.95E−02 | −1.16 | 2 |
| hsa-asg-6018 | 10.24 | 9.98 | 10.22 | 0.17 | 100 | 2.94E−02 | −0.75 | 2 |
| hsa-asg-6000 | 6.61 | 7.53 | 7.20 | 0.58 | 0 | 2.42E−02 | 1.13 | 2 |
| hsa-asg-5960 | 9.92 | 9.78 | 10.08 | 0.27 | 100 | 2.51E−03 | 1.16 | 2 |
| hsa-asg-5952 | 4.29 | 3.44 | 4.02 | 0.39 | 0 | 2.27E−03 | 1.89 | 4 |
| hsa-asg-5889 | 4.81 | 6.15 | 5.18 | 0.94 | 25 | 6.59E−03 | 2.49 | 6 |
| hsa-asg-5873 | 2.74 | 3.25 | 3.08 | 0.59 | 0 | 5.91E−03 | 1.95 | 4 |
| hsa-asg-585 | 12.97 | 12.72 | 12.77 | 0.17 | 100 | 1.66E−02 | −0.45 | 1 |
| hsa-asg-5827 | 5.93 | 3.75 | 4.46 | 1.08 | 25 | 6.09E−03 | 3.01 | 8 |
| hsa-asg-5810 | 10.08 | 10.34 | 10.15 | 0.13 | 100 | 4.13E−02 | −0.39 | 1 |
| hsa-asg-5773 | 6.90 | 7.36 | 6.96 | 0.29 | 0 | 1.22E−02 | 1.33 | 3 |
| hsa-asg-5728 | 9.75 | 9.44 | 9.58 | 0.37 | 100 | 2.43E−03 | 1.48 | 3 |
| hsa-asg-572 | 6.71 | 6.56 | 7.01 | 0.47 | 0 | 1.17E−02 | 1.85 | 4 |
| hsa-asg-5695 | 2.11 | 2.65 | 2.55 | 0.30 | 0 | 2.01E−03 | 1.74 | 3 |
| hsa-asg-562 | 7.97 | 8.06 | 7.74 | 0.59 | 100 | 1.01E−02 | 2.10 | 4 |
| hsa-asg-5519 | 6.06 | 7.72 | 6.94 | 0.70 | 25 | 1.84E−02 | −1.76 | 3 |
| hsa-asg-5511 | 6.80 | 7.21 | 7.21 | 0.41 | 100 | 3.96E−02 | 1.17 | 2 |
| hsa-asg-547 | 2.11 | 2.33 | 2.02 | 0.34 | 0 | 4.98E−02 | 0.52 | 1 |
| hsa-asg-5467 | 4.55 | 3.60 | 4.09 | 0.40 | 75 | 6.04E−03 | −1.12 | 2 |
| hsa-asg-5451 | 4.16 | 3.75 | 3.57 | 0.63 | 0 | 5.40E−03 | 1.86 | 4 |
| hsa-asg-5421 | 7.76 | 7.24 | 7.42 | 0.31 | 25 | 8.72E−03 | 0.86 | 2 |
| hsa-asg-5399 | 9.69 | 9.79 | 10.04 | 0.36 | 100 | 3.07E−02 | −1.61 | 3 |
| hsa-asg-5365 | 6.18 | 5.55 | 5.91 | 0.43 | 50 | 3.76E−02 | −1.47 | 3 |
| hsa-asg-5326 | 8.26 | 7.65 | 8.02 | 0.28 | 100 | 3.77E−03 | −1.76 | 3 |
| hsa-asg-5304 | 7.64 | 7.24 | 7.29 | 0.25 | 0 | 2.35E−03 | 1.62 | 3 |
| hsa-asg-5290 | 3.59 | 5.53 | 4.80 | 0.87 | 75 | 2.46E−02 | −1.75 | 3 |
| hsa-asg-529 | 3.59 | 3.34 | 3.86 | 0.66 | 25 | 8.06E−03 | −1.93 | 4 |
| hsa-asg-5289 | 10.02 | 9.83 | 9.74 | 0.30 | 75 | 1.90E−02 | −0.64 | 2 |
| hsa-asg-5240 | 3.54 | 3.52 | 3.51 | 0.10 | 75 | 5.76E−04 | 0.62 | 2 |
| hsa-asg-5227 | 3.64 | 4.38 | 4.35 | 0.63 | 0 | 4.05E−02 | 1.27 | 2 |
| hsa-asg-5176 | 3.19 | 1.94 | 2.86 | 0.73 | 0 | 2.93E−03 | 2.61 | 6 |
| hsa-asg-5134 | 2.11 | 1.71 | 2.19 | 0.48 | 0 | 1.86E−02 | 1.61 | 3 |
| hsa-asg-5122 | 9.63 | 9.65 | 9.45 | 0.25 | 100 | 8.36E−03 | 1.31 | 2 |
| hsa-asg-5115 | 10.03 | 10.23 | 9.99 | 0.32 | 100 | 3.37E−03 | 0.98 | 2 |
| hsa-asg-5109 | 10.81 | 10.93 | 11.06 | 0.24 | 100 | 8.06E−03 | 0.73 | 2 |
| hsa-asg-509 | 4.20 | 4.18 | 4.23 | 0.49 | 25 | 1.53E−03 | −1.90 | 4 |
| hsa-asg-5085 | 10.28 | 10.13 | 10.34 | 0.18 | 100 | 1.80E−02 | 0.54 | 1 |
| hsa-asg-5061 | 9.98 | 9.32 | 9.73 | 0.36 | 100 | 4.69E−02 | −0.74 | 2 |
| hsa-asg-5053 | 4.20 | 2.92 | 3.57 | 0.64 | 25 | 4.51E−02 | 1.05 | 2 |
| hsa-asg-5005 | 8.29 | 8.42 | 8.34 | 0.30 | 0 | 2.61E−03 | 1.06 | 2 |
| hsa-asg-5000 | 4.47 | 5.18 | 5.34 | 0.93 | 75 | 3.61E−02 | 1.56 | 3 |
| hsa-asg-4990 | 9.06 | 9.65 | 9.20 | 0.33 | 100 | 4.31E−03 | 1.18 | 2 |
| hsa-asg-4971 | 9.26 | 9.28 | 9.36 | 0.15 | 100 | 5.56E−03 | 0.62 | 2 |
| hsa-asg-4914 | 1.00 | 1.94 | 1.30 | 0.44 | 0 | 8.23E−03 | 2.61 | 6 |
| hsa-asg-4912 | 10.30 | 9.95 | 10.28 | 0.23 | 100 | 8.42E−04 | 0.99 | 2 |
| hsa-asg-4892 | 3.64 | 3.75 | 3.66 | 0.11 | 0 | 1.53E−02 | 0.34 | 1 |
| hsa-asg-4854 | 8.94 | 9.16 | 9.10 | 0.12 | 100 | 6.85E−04 | −1.00 | 2 |
| hsa-asg-4847 | 8.56 | 8.54 | 8.96 | 0.47 | 100 | 1.86E−02 | 0.98 | 2 |
| hsa-asg-4844 | 10.10 | 9.87 | 9.90 | 0.19 | 100 | 4.82E−02 | −0.57 | 1 |
| hsa-asg-4840 | 5.05 | 3.60 | 3.91 | 0.79 | 25 | 1.93E−02 | 2.01 | 4 |
| hsa-asg-4839 | 12.99 | 12.70 | 12.81 | 0.17 | 100 | 2.22E−02 | −0.40 | 1 |
| hsa-asg-481 | 2.23 | 1.46 | 1.85 | 0.31 | 0 | 1.29E−02 | 2.19 | 5 |
| hsa-asg-4722 | 8.54 | 8.13 | 8.08 | 0.35 | 0 | 2.23E−03 | −1.44 | 3 |
| hsa-asg-471 | 10.75 | 10.92 | 10.79 | 0.09 | 100 | 2.93E−04 | −0.64 | 2 |
| hsa-asg-4703 | 7.02 | 7.61 | 7.59 | 0.46 | 100 | 4.24E−02 | −1.16 | 2 |
| hsa-asg-47 | 10.85 | 10.58 | 10.65 | 0.17 | 100 | 1.47E−02 | 0.59 | 2 |
| hsa-asg-468 | 7.86 | 8.10 | 8.15 | 0.28 | 100 | 1.02E−03 | 1.50 | 3 |
| hsa-asg-4654 | 12.44 | 12.17 | 12.28 | 0.13 | 100 | 2.32E−02 | −0.26 | 1 |
| hsa-asg-4618 | 5.98 | 7.19 | 6.88 | 0.60 | 100 | 4.42E−02 | −1.09 | 2 |
| hsa-asg-459 | 12.45 | 12.31 | 12.37 | 0.09 | 100 | 2.53E−04 | −0.60 | 2 |
| hsa-asg-4580 | 6.23 | 5.30 | 6.10 | 0.55 | 75 | 4.90E−02 | −0.87 | 2 |
| hsa-asg-458 | 8.97 | 8.75 | 9.33 | 0.59 | 100 | 5.17E−03 | −1.79 | 3 |
| hsa-asg-4529 | 10.42 | 9.98 | 10.13 | 0.28 | 100 | 1.10E−02 | 0.94 | 2 |
| hsa-asg-4469 | 9.28 | 8.88 | 8.76 | 0.43 | 100 | 1.30E−02 | 0.99 | 2 |
| hsa-asg-4458 | 7.55 | 8.39 | 7.74 | 0.56 | 100 | 2.04E−02 | 1.23 | 2 |
| hsa-asg-4448 | 3.90 | 3.15 | 3.04 | 0.75 | 0 | 4.02E−02 | 1.27 | 2 |
| hsa-asg-430 | 3.59 | 5.85 | 4.74 | 0.95 | 75 | 3.65E−03 | −3.00 | 8 |
| hsa-asg-4262 | 8.00 | 7.46 | 7.85 | 0.42 | 100 | 4.83E−02 | 0.72 | 2 |
| hsa-asg-425 | 8.15 | 7.02 | 7.82 | 0.54 | 100 | 4.18E−03 | 2.15 | 4 |
| hsa-asg-4236 | 3.94 | 2.33 | 3.26 | 0.68 | 0 | 3.37E−02 | 1.33 | 3 |
| hsa-asg-4223 | 11.91 | 11.75 | 11.85 | 0.07 | 100 | 9.52E−05 | 0.73 | 2 |
| hsa-asg-4222 | 7.63 | 7.83 | 7.62 | 0.46 | 100 | 2.57E−03 | 1.81 | 3 |
| hsa-asg-4209 | 9.18 | 9.09 | 9.31 | 0.23 | 100 | 1.42E−03 | 1.12 | 2 |
| hsa-asg-4199 | 6.53 | 6.49 | 6.93 | 0.49 | 100 | 3.90E−02 | 0.88 | 2 |
| hsa-asg-4172 | 3.05 | 4.28 | 3.40 | 0.59 | 25 | 1.60E−02 | 1.41 | 3 |
| hsa-asg-4146 | 8.92 | 8.40 | 8.71 | 0.22 | 100 | 2.18E−02 | 0.75 | 2 |
| hsa-asg-4122 | 2.34 | 2.15 | 2.63 | 0.61 | 0 | 1.42E−02 | 1.83 | 4 |
| hsa-asg-412 | 9.53 | 9.30 | 9.48 | 0.15 | 100 | 4.00E−02 | 0.31 | 1 |
| hsa-asg-4114 | 3.64 | 4.33 | 3.87 | 0.34 | 25 | 1.77E−02 | 1.27 | 2 |
| hsa-asg-4075 | 2.55 | 1.94 | 2.26 | 0.29 | 0 | 4.75E−02 | 1.36 | 3 |
| hsa-asg-4064 | 4.92 | 5.51 | 5.18 | 0.68 | 100 | 4.77E−03 | −3.02 | 8 |
| hsa-asg-4061 | 9.33 | 9.12 | 9.37 | 0.19 | 100 | 2.20E−03 | 1.03 | 2 |
| hsa-asg-4059 | 10.19 | 10.30 | 10.16 | 0.21 | 100 | 9.73E−03 | −0.57 | 1 |
| hsa-asg-4057 | 2.11 | 1.71 | 1.88 | 0.17 | 0 | 3.36E−02 | 0.43 | 1 |
| hsa-asg-4045 | 5.51 | 5.82 | 5.57 | 0.41 | 0 | 1.34E−03 | −1.84 | 4 |
| hsa-asg-4023 | 9.41 | 9.35 | 9.51 | 0.15 | 100 | 2.50E−02 | −0.65 | 2 |
| hsa-asg-4019 | 6.41 | 6.75 | 6.82 | 0.31 | 100 | 2.81E−02 | 0.57 | 1 |
| hsa-asg-4005 | 7.42 | 7.24 | 7.55 | 0.33 | 100 | 2.87E−02 | −0.98 | 2 |
| hsa-asg-4002 | 8.34 | 7.93 | 8.01 | 0.24 | 100 | 1.03E−02 | 0.98 | 2 |
| hsa-asg-3999 | 10.46 | 10.47 | 10.63 | 0.20 | 100 | 7.68E−03 | 0.63 | 2 |
| hsa-asg-3988 | 8.55 | 8.38 | 8.62 | 0.19 | 100 | 9.35E−03 | 0.49 | 1 |
| hsa-asg-3983 | 10.46 | 9.76 | 10.18 | 0.31 | 0 | 3.75E−03 | 1.42 | 3 |
| hsa-asg-3977 | 5.55 | 5.07 | 4.83 | 0.81 | 75 | 2.96E−02 | 1.46 | 3 |
| hsa-asg-3970 | 3.43 | 4.42 | 4.20 | 0.52 | 75 | 4.30E−03 | 2.20 | 5 |
| hsa-asg-395 | 9.59 | 9.44 | 9.74 | 0.28 | 100 | 4.20E−02 | −0.47 | 1 |
| hsa-asg-3941 | 8.85 | 8.84 | 9.06 | 0.26 | 50 | 3.20E−03 | 1.36 | 3 |
| hsa-asg-3915 | 10.48 | 10.46 | 10.51 | 0.06 | 100 | 2.44E−03 | 0.29 | 1 |
| hsa-asg-3910 | 2.82 | 2.65 | 2.17 | 0.73 | 0 | 3.13E−03 | 3.30 | 10 |
| hsa-asg-3882 | 4.72 | 4.88 | 5.11 | 0.55 | 100 | 2.01E−02 | 1.10 | 2 |
| hsa-asg-3854 | 2.74 | 4.23 | 2.63 | 1.30 | 25 | 3.46E−02 | 2.25 | 5 |
| hsa-asg-3842 | 2.34 | 2.65 | 2.49 | 0.21 | 0 | 3.62E−02 | 1.50 | 3 |
| hsa-asg-3822 | 1.36 | 3.68 | 2.80 | 1.05 | 0 | 4.69E−02 | 2.18 | 5 |
| hsa-asg-3807 | 2.65 | 1.94 | 2.55 | 0.41 | 0 | 1.78E−02 | 2.32 | 5 |
| hsa-asg-3786 | 8.93 | 8.73 | 8.79 | 0.22 | 100 | 4.14E−02 | −0.40 | 1 |
| hsa-asg-3777 | 9.21 | 9.00 | 9.08 | 0.25 | 25 | 3.46E−03 | −0.94 | 2 |
| hsa-asg-377 | 11.63 | 11.35 | 11.55 | 0.14 | 0 | 1.10E−02 | 0.54 | 1 |
| hsa-asg-3722 | 10.02 | 10.05 | 10.02 | 0.19 | 100 | 2.50E−03 | 1.17 | 2 |
| hsa-asg-3715 | 9.98 | 9.96 | 10.17 | 0.25 | 100 | 1.59E−02 | −0.63 | 2 |
| hsa-asg-3714 | 7.85 | 7.83 | 7.92 | 0.10 | 100 | 4.11E−03 | −0.71 | 2 |
| hsa-asg-3694 | 8.85 | 8.83 | 8.73 | 0.16 | 25 | 8.99E−03 | −0.95 | 2 |
| hsa-asg-3654 | 7.11 | 7.36 | 7.08 | 0.46 | 0 | 2.10E−03 | 1.62 | 3 |
| hsa-asg-3637 | 10.66 | 10.28 | 10.68 | 0.33 | 100 | 1.33E−02 | 0.78 | 2 |
| hsa-asg-3551 | 3.05 | 3.89 | 3.35 | 0.70 | 0 | 3.64E−02 | 1.23 | 2 |
| hsa-asg-355 | 2.74 | 3.75 | 3.13 | 0.45 | 0 | 1.28E−02 | 1.04 | 2 |
| hsa-asg-3516 | 4.02 | 4.12 | 4.30 | 0.30 | 50 | 3.75E−02 | −0.72 | 2 |
| hsa-asg-3513 | 3.43 | 3.25 | 3.32 | 0.24 | 0 | 1.50E−03 | 1.00 | 2 |
| hsa-asg-3464 | 13.78 | 13.52 | 13.72 | 0.15 | 100 | 2.87E−03 | −0.49 | 1 |
| hsa-asg-3462 | 12.33 | 12.09 | 12.26 | 0.14 | 100 | 7.82E−04 | −0.67 | 2 |
| hsa-asg-3383 | 11.14 | 11.19 | 11.48 | 0.37 | 100 | 1.40E−02 | 0.86 | 2 |
| hsa-asg-3360 | 7.62 | 7.78 | 7.60 | 0.14 | 100 | 6.87E−03 | 0.44 | 1 |
| hsa-asg-3345 | 11.65 | 11.51 | 11.57 | 0.13 | 100 | 9.62E−03 | 0.53 | 1 |
| hsa-asg-3296 | 4.06 | 4.71 | 4.42 | 0.47 | 0 | 2.33E−02 | 1.06 | 2 |
| hsa-asg-3291 | 8.34 | 8.27 | 8.43 | 0.26 | 100 | 9.63E−03 | −0.70 | 2 |
| hsa-asg-3290 | 9.05 | 9.15 | 9.17 | 0.14 | 50 | 2.72E−03 | 0.49 | 1 |
| hsa-asg-3278 | 9.33 | 8.59 | 8.65 | 0.46 | 25 | 2.63E−03 | 1.62 | 3 |
| hsa-asg-3271 | 10.94 | 10.78 | 10.99 | 0.20 | 100 | 2.04E−03 | −0.71 | 2 |
| hsa-asg-3265 | 5.48 | 5.12 | 5.25 | 1.01 | 75 | 1.37E−02 | 2.36 | 5 |
| hsa-asg-3231 | 12.48 | 12.13 | 12.30 | 0.14 | 100 | 4.27E−03 | 0.71 | 2 |
| hsa-asg-32 | 8.11 | 8.14 | 7.98 | 0.26 | 100 | 2.83E−03 | −0.87 | 2 |
| hsa-asg-3199 | 5.98 | 5.71 | 5.72 | 0.18 | 50 | 3.65E−03 | 1.26 | 2 |
| hsa-asg-3186 | 11.74 | 11.55 | 11.62 | 0.08 | 0 | 3.35E−02 | 0.18 | 1 |
| hsa-asg-3182 | 7.72 | 7.42 | 7.87 | 0.44 | 75 | 1.97E−03 | 1.74 | 3 |
| hsa-asg-3156 | 5.99 | 6.64 | 6.54 | 0.39 | 100 | 7.54E−03 | 1.83 | 4 |
| hsa-asg-3130 | 12.21 | 11.87 | 11.98 | 0.22 | 100 | 3.89E−02 | −0.41 | 1 |
| hsa-asg-3124 | 2.82 | 3.52 | 2.46 | 0.97 | 0 | 1.36E−02 | 2.43 | 5 |
| hsa-asg-3112 | 9.79 | 9.32 | 9.51 | 0.22 | 100 | 1.81E−03 | −0.97 | 2 |
| hsa-asg-3101 | 8.51 | 8.65 | 8.63 | 0.08 | 100 | 7.02E−03 | 0.85 | 2 |
| hsa-asg-3073 | 8.92 | 8.73 | 9.12 | 0.35 | 100 | 2.70E−02 | −0.94 | 2 |
| hsa-asg-3070 | 3.43 | 2.50 | 2.74 | 0.58 | 0 | 1.52E−03 | 2.31 | 5 |
| hsa-asg-3046 | 9.10 | 9.30 | 9.30 | 0.14 | 100 | 1.02E−02 | 0.81 | 2 |
| hsa-asg-3038 | 4.90 | 5.15 | 5.03 | 0.12 | 0 | 2.18E−02 | 0.35 | 1 |
| hsa-asg-3015 | 6.38 | 3.89 | 5.06 | 1.76 | 50 | 4.20E−02 | −2.99 | 8 |
| hsa-asg-3013 | 7.28 | 6.93 | 7.12 | 0.15 | 0 | 6.60E−03 | −0.50 | 1 |
| hsa-asg-2981 | 4.29 | 4.71 | 4.55 | 0.20 | 75 | 8.65E−03 | 0.51 | 1 |
| hsa-asg-2966 | 7.57 | 8.48 | 7.97 | 0.38 | 0 | 4.21E−02 | 0.88 | 2 |
| hsa-asg-2952 | 3.05 | 2.50 | 2.78 | 0.36 | 0 | 1.17E−02 | 1.15 | 2 |
| hsa-asg-2940 | 3.73 | 4.38 | 3.95 | 0.29 | 0 | 9.42E−03 | 0.87 | 2 |
| hsa-asg-2930 | 2.98 | 2.92 | 2.62 | 0.42 | 0 | 1.54E−03 | 1.96 | 4 |
| hsa-asg-2924 | 1.36 | −0.02 | 1.48 | 1.16 | 0 | 1.18E−03 | 4.69 | 26 |
| hsa-asg-2899 | 13.25 | 12.89 | 13.06 | 0.17 | 100 | 3.45E−02 | −0.37 | 1 |
| hsa-asg-2872 | 11.61 | 11.90 | 11.74 | 0.16 | 100 | 2.05E−02 | 0.49 | 1 |
| hsa-asg-2862 | 9.49 | 9.63 | 9.64 | 0.10 | 50 | 2.58E−03 | 0.66 | 2 |
| hsa-asg-2858 | 9.39 | 9.36 | 9.50 | 0.15 | 100 | 4.70E−02 | 0.38 | 1 |
| hsa-asg-2856 | 10.49 | 11.27 | 10.63 | 0.43 | 100 | 3.65E−03 | 1.38 | 3 |
| hsa-asg-2855 | 1.84 | 2.33 | 2.32 | 0.34 | 0 | 2.89E−03 | 1.45 | 3 |
| hsa-asg-2843 | 2.90 | 2.79 | 2.70 | 0.29 | 0 | 2.07E−02 | 0.73 | 2 |
| hsa-asg-2660 | 8.85 | 8.72 | 9.15 | 0.58 | 100 | 2.65E−03 | −3.95 | 15 |
| hsa-asg-265 | 9.28 | 9.28 | 9.33 | 0.15 | 100 | 3.64E−02 | −0.28 | 1 |
| hsa-asg-2620 | 3.98 | 4.38 | 3.64 | 0.68 | 25 | 1.50E−02 | 1.50 | 3 |
| hsa-asg-2588 | 9.80 | 9.81 | 9.82 | 0.09 | 100 | 9.29E−03 | 0.50 | 1 |
| hsa-asg-2580 | 11.69 | 11.54 | 11.57 | 0.14 | 100 | 6.12E−03 | 0.55 | 1 |
| hsa-asg-257 | 1.84 | 3.15 | 2.78 | 0.65 | 0 | 4.11E−02 | 1.28 | 2 |
| hsa-asg-2565 | 4.60 | 3.68 | 3.43 | 0.93 | 25 | 2.53E−02 | 2.19 | 5 |
| hsa-asg-2563 | 8.84 | 8.82 | 8.86 | 0.07 | 100 | 8.80E−04 | 0.68 | 2 |
| hsa-asg-2542 | 7.18 | 8.58 | 8.42 | 1.01 | 50 | 3.49E−02 | −1.86 | 4 |
| hsa-asg-2541 | 8.38 | 8.36 | 8.57 | 0.26 | 25 | 4.45E−02 | 0.66 | 2 |
| hsa-asg-2473 | 7.22 | 6.92 | 7.30 | 0.31 | 100 | 1.30E−03 | −1.41 | 3 |
| hsa-asg-247 | 8.41 | 8.14 | 8.37 | 0.15 | 100 | 1.65E−03 | 0.60 | 2 |
| hsa-asg-2459 | 2.11 | 2.33 | 2.35 | 0.38 | 0 | 3.04E−02 | 1.68 | 3 |
| hsa-asg-2449 | 6.35 | 4.42 | 5.74 | 1.55 | 50 | 1.97E−02 | −3.17 | 9 |
| hsa-asg-2437 | 7.86 | 8.13 | 8.10 | 0.17 | 100 | 2.56E−02 | 0.32 | 1 |
| hsa-asg-2433 | 3.86 | 4.01 | 4.12 | 0.27 | 25 | 3.02E−02 | −0.75 | 2 |
| hsa-asg-2401 | 9.27 | 9.34 | 9.35 | 0.11 | 100 | 4.41E−02 | 0.39 | 1 |
| hsa-asg-2371 | 1.84 | 2.15 | 1.91 | 0.42 | 0 | 1.22E−02 | 1.10 | 2 |
| hsa-asg-2365 | 2.23 | 0.27 | 1.71 | 1.11 | 0 | 3.99E−03 | 3.62 | 12 |
| hsa-asg-2273 | 4.70 | 2.15 | 2.90 | 1.20 | 25 | 4.31E−02 | 1.93 | 4 |
| hsa-asg-2267 | 9.59 | 9.00 | 9.23 | 0.40 | 100 | 3.87E−02 | −0.71 | 2 |
| hsa-asg-2237 | 7.37 | 6.41 | 6.68 | 0.48 | 100 | 1.42E−02 | −1.71 | 3 |
| hsa-asg-2228 | 10.52 | 9.95 | 10.08 | 0.30 | 100 | 9.02E−03 | 0.87 | 2 |
| hsa-asg-2199 | 11.74 | 11.89 | 11.91 | 0.19 | 100 | 2.40E−02 | −0.35 | 1 |
| hsa-asg-2195 | 12.16 | 11.99 | 12.13 | 0.20 | 100 | 1.71E−02 | −0.44 | 1 |
| hsa-asg-2174 | 8.24 | 7.17 | 7.83 | 0.47 | 0 | 2.48E−02 | 1.04 | 2 |
| hsa-asg-2160 | 8.46 | 8.51 | 8.33 | 0.24 | 100 | 3.31E−02 | −0.47 | 1 |
| hsa-asg-2149 | 7.47 | 7.62 | 7.51 | 0.11 | 100 | 4.40E−03 | −0.35 | 1 |
| hsa-asg-2138 | 8.69 | 8.67 | 8.78 | 0.20 | 25 | 2.83E−02 | 0.66 | 2 |
| hsa-asg-2094 | 3.54 | 3.68 | 3.19 | 0.75 | 0 | 9.03E−03 | 2.00 | 4 |
| hsa-asg-1981 | 5.18 | 4.88 | 5.33 | 0.37 | 0 | 6.21E−03 | 2.44 | 5 |
| hsa-asg-1978 | 3.82 | 3.34 | 3.52 | 0.42 | 0 | 1.62E−02 | 0.91 | 2 |
| hsa-asg-1941 | 3.90 | 4.07 | 3.71 | 0.33 | 25 | 1.72E−02 | −0.86 | 2 |
| hsa-asg-1911 | 9.81 | 9.90 | 9.84 | 0.23 | 100 | 7.60E−03 | −0.76 | 2 |
| hsa-asg-1888 | 10.02 | 9.74 | 10.01 | 0.27 | 100 | 7.95E−03 | 0.80 | 2 |
| hsa-asg-1861 | 10.31 | 10.35 | 10.45 | 0.17 | 100 | 2.97E−02 | −0.41 | 1 |
| hsa-asg-1858 | 12.11 | 11.90 | 11.93 | 0.13 | 50 | 2.27E−03 | 0.84 | 2 |
| hsa-asg-1852 | 4.96 | 4.91 | 4.89 | 0.09 | 0 | 1.03E−02 | −0.80 | 2 |
| hsa-asg-1838 | 5.45 | 5.12 | 5.20 | 0.18 | 0 | 4.29E−02 | 1.14 | 2 |
| hsa-asg-1827 | 3.05 | 2.15 | 3.05 | 0.67 | 50 | 2.15E−02 | −1.31 | 2 |
| hsa-asg-1813 | 11.63 | 11.27 | 11.51 | 0.17 | 100 | 1.94E−02 | −0.46 | 1 |
| hsa-asg-1809 | 10.68 | 10.70 | 10.74 | 0.11 | 100 | 2.29E−02 | 0.25 | 1 |
| hsa-asg-18 | 8.75 | 8.16 | 8.41 | 0.31 | 0 | 1.89E−02 | −0.81 | 2 |
| hsa-asg-1797 | 9.76 | 9.74 | 9.80 | 0.08 | 100 | 7.02E−03 | −0.50 | 1 |
| hsa-asg-1775 | 9.96 | 9.55 | 9.91 | 0.30 | 100 | 3.73E−02 | −0.58 | 1 |
| hsa-asg-1766 | 2.90 | 2.50 | 2.73 | 0.75 | 0 | 2.42E−02 | 1.47 | 3 |
| hsa-asg-1755 | 3.05 | 1.71 | 2.27 | 0.71 | 0 | 5.45E−03 | 2.53 | 6 |
| hsa-asg-1747 | 2.98 | 3.25 | 4.01 | 1.04 | 0 | 7.49E−03 | 2.68 | 6 |
| hsa-asg-1736 | 9.68 | 9.24 | 9.60 | 0.40 | 100 | 3.77E−03 | 1.28 | 2 |
| hsa-asg-1727 | 7.65 | 8.13 | 7.99 | 0.23 | 0 | 6.40E−03 | 0.76 | 2 |
| hsa-asg-1726 | 11.03 | 11.16 | 11.05 | 0.10 | 100 | 1.77E−03 | −0.64 | 2 |
| hsa-asg-1716 | 9.35 | 8.85 | 9.12 | 0.22 | 50 | 1.28E−03 | −0.95 | 2 |
| hsa-asg-1699 | 10.03 | 10.05 | 9.95 | 0.11 | 75 | 3.46E−03 | 0.60 | 2 |
| hsa-asg-1686 | 7.59 | 7.99 | 7.80 | 0.22 | 0 | 1.69E−02 | 0.51 | 1 |
| hsa-asg-1641 | 8.80 | 8.74 | 8.85 | 0.11 | 25 | 1.84E−02 | 0.94 | 2 |
| hsa-asg-1591 | 9.33 | 7.80 | 8.68 | 0.64 | 100 | 4.00E−02 | −1.07 | 2 |
| hsa-asg-1588 | 5.44 | 4.91 | 5.14 | 0.70 | 25 | 4.09E−02 | 1.18 | 2 |
| hsa-asg-1573 | 11.35 | 11.27 | 11.31 | 0.05 | 100 | 3.47E−04 | −0.27 | 1 |
| hsa-asg-156 | 6.21 | 5.88 | 6.23 | 0.30 | 100 | 4.05E−02 | 0.72 | 2 |
| hsa-asg-1544 | 2.74 | 3.89 | 2.79 | 0.83 | 0 | 1.17E−02 | 1.95 | 4 |
| hsa-asg-1534 | 2.34 | 2.15 | 2.05 | 0.25 | 0 | 3.89E−03 | 1.65 | 3 |
| hsa-asg-1532 | 7.82 | 8.25 | 8.10 | 0.41 | 75 | 4.46E−03 | −1.79 | 3 |
| hsa-asg-1519 | 2.74 | 4.33 | 3.65 | 1.70 | 50 | 3.55E−02 | 2.89 | 7 |
| hsa-asg-1482 | 4.13 | 3.25 | 3.79 | 0.38 | 75 | 3.93E−02 | 1.31 | 2 |
| hsa-asg-145 | 9.75 | 9.97 | 9.99 | 0.19 | 100 | 5.25E−03 | 1.14 | 2 |
| hsa-asg-1448 | 7.79 | 7.17 | 7.68 | 0.42 | 0 | 1.80E−03 | 1.84 | 4 |
| hsa-asg-14242 | 6.06 | 6.61 | 6.64 | 0.66 | 100 | 3.61E−02 | −1.50 | 3 |
| hsa-asg-14237 | 8.50 | 8.98 | 8.86 | 0.30 | 100 | 1.30E−02 | 0.81 | 2 |
| hsa-asg-14233 | 8.25 | 7.72 | 7.66 | 0.50 | 100 | 2.32E−03 | 1.91 | 4 |
| hsa-asg-14217 | 4.83 | 6.96 | 6.21 | 0.94 | 0 | 2.87E−03 | 3.11 | 9 |
| hsa-asg-1420 | 9.64 | 9.57 | 9.34 | 0.32 | 100 | 4.19E−03 | 1.13 | 2 |
| hsa-asg-14198 | 2.34 | 2.92 | 2.30 | 0.46 | 0 | 1.01E−02 | 1.79 | 3 |
| hsa-asg-14197 | 13.55 | 13.49 | 13.43 | 0.14 | 100 | 6.78E−03 | −0.44 | 1 |
| hsa-asg-14189 | 14.67 | 14.49 | 14.55 | 0.11 | 100 | 1.03E−02 | 0.47 | 1 |
| hsa-asg-14176 | 6.94 | 7.08 | 7.17 | 0.71 | 100 | 4.03E−02 | 1.16 | 2 |
| hsa-asg-14136 | 8.55 | 8.48 | 8.55 | 0.08 | 100 | 4.14E−02 | −0.15 | 1 |
| hsa-asg-14135 | 3.19 | 3.68 | 3.51 | 0.29 | 0 | 3.29E−02 | 1.40 | 3 |
| hsa-asg-14133 | 5.16 | 6.08 | 5.51 | 0.75 | 100 | 2.20E−02 | 1.54 | 3 |
| hsa-asg-14068 | 13.77 | 13.39 | 13.56 | 0.20 | 100 | 2.28E−02 | −0.40 | 1 |
| hsa-asg-14066 | 9.29 | 9.20 | 9.27 | 0.11 | 50 | 5.23E−04 | −0.57 | 1 |
| hsa-asg-14053 | 6.23 | 5.96 | 6.09 | 0.11 | 0 | 2.46E−02 | −1.56 | 3 |
| hsa-asg-14034 | 13.36 | 13.11 | 13.15 | 0.15 | 100 | 4.45E−02 | 0.28 | 1 |
| hsa-asg-14026 | 2.55 | 3.75 | 3.11 | 0.50 | 0 | 3.95E−02 | −1.05 | 2 |
| hsa-asg-14002 | 8.73 | 8.06 | 8.77 | 0.51 | 100 | 5.66E−03 | 1.61 | 3 |
| hsa-asg-14 | 3.73 | 2.92 | 3.32 | 0.74 | 25 | 1.12E−02 | 1.79 | 3 |
| hsa-asg-13988 | 4.50 | 5.40 | 5.45 | 1.04 | 100 | 6.89E−03 | −2.78 | 7 |
| hsa-asg-13970 | 7.37 | 8.13 | 7.72 | 0.37 | 25 | 3.23E−02 | 0.78 | 2 |
| hsa-asg-13966 | 9.38 | 8.14 | 9.11 | 0.66 | 100 | 1.05E−02 | 1.75 | 3 |
| hsa-asg-13933 | 8.55 | 8.63 | 8.48 | 0.33 | 100 | 2.98E−03 | 1.44 | 3 |
| hsa-asg-13931 | 8.25 | 8.11 | 8.15 | 0.42 | 100 | 4.57E−02 | −1.60 | 3 |
| hsa-asg-1389 | 13.65 | 13.42 | 13.59 | 0.12 | 100 | 1.79E−03 | −0.53 | 1 |
| hsa-asg-13882 | 2.11 | 2.15 | 2.05 | 0.13 | 0 | 1.79E−02 | −0.99 | 2 |
| hsa-asg-13870 | 9.78 | 9.36 | 9.74 | 0.26 | 100 | 3.80E−02 | 0.65 | 2 |
| hsa-asg-13851 | 5.78 | 4.74 | 5.37 | 0.45 | 25 | 4.01E−03 | −3.01 | 8 |
| hsa-asg-13819 | 2.34 | 2.65 | 2.24 | 0.34 | 0 | 3.36E−02 | 0.65 | 2 |
| hsa-asg-13764 | 9.50 | 9.58 | 9.73 | 0.31 | 100 | 1.49E−02 | −1.16 | 2 |
| hsa-asg-13736 | 8.62 | 8.60 | 8.72 | 0.13 | 25 | 1.20E−02 | 0.66 | 2 |
| hsa-asg-13730 | 3.12 | 3.04 | 3.92 | 1.32 | 25 | 2.99E−02 | −2.38 | 5 |
| hsa-asg-13659 | 9.34 | 9.36 | 9.40 | 0.18 | 75 | 5.67E−03 | 0.56 | 1 |
| hsa-asg-13646 | 6.57 | 6.55 | 6.29 | 0.54 | 75 | 1.22E−03 | 2.55 | 6 |
| hsa-asg-13620 | 13.21 | 13.07 | 13.09 | 0.16 | 100 | 1.75E−02 | −0.40 | 1 |
| hsa-asg-13611 | 5.99 | 6.48 | 6.37 | 0.42 | 100 | 2.41E−02 | −2.00 | 4 |
| hsa-asg-13606 | 11.89 | 11.80 | 11.90 | 0.19 | 100 | 1.60E−02 | −0.85 | 2 |
| hsa-asg-13501 | 6.40 | 6.08 | 6.62 | 0.57 | 100 | 1.50E−02 | −1.98 | 4 |
| hsa-asg-13500 | 9.70 | 9.78 | 9.88 | 0.24 | 75 | 1.21E−02 | −0.64 | 2 |
| hsa-asg-13498 | 8.77 | 8.49 | 8.65 | 0.15 | 100 | 1.99E−03 | −1.47 | 3 |
| hsa-asg-13450 | 4.77 | 4.95 | 5.64 | 1.04 | 25 | 3.20E−02 | −2.26 | 5 |
| hsa-asg-13444 | 4.70 | 2.33 | 3.92 | 1.14 | 50 | 3.43E−02 | −1.98 | 4 |
| hsa-asg-13436 | 6.62 | 5.57 | 5.99 | 0.71 | 100 | 1.54E−02 | 1.79 | 3 |
| hsa-asg-13404 | 0.61 | 1.71 | 1.10 | 0.78 | 0 | 4.02E−02 | 3.18 | 9 |
| hsa-asg-13387 | 9.11 | 9.15 | 9.30 | 0.20 | 75 | 4.69E−02 | −0.86 | 2 |
| hsa-asg-1337 | 6.94 | 7.38 | 6.94 | 0.39 | 100 | 2.12E−03 | 1.62 | 3 |
| hsa-asg-13353 | 8.24 | 8.92 | 8.65 | 0.54 | 100 | 2.52E−03 | −4.16 | 18 |
| hsa-asg-13349 | 2.74 | 3.04 | 2.87 | 0.18 | 0 | 2.45E−02 | 1.17 | 2 |
| hsa-asg-13334 | 3.31 | 5.33 | 4.14 | 0.87 | 0 | 4.73E−02 | 1.42 | 3 |
| hsa-asg-13320 | 3.86 | 4.55 | 4.10 | 0.41 | 25 | 1.46E−02 | 1.18 | 2 |
| hsa-asg-13306 | 12.12 | 12.49 | 12.39 | 0.20 | 100 | 1.09E−02 | 0.54 | 1 |
| hsa-asg-13304 | 4.52 | 4.95 | 3.87 | 1.14 | 0 | 5.22E−03 | 3.40 | 11 |
| hsa-asg-13303 | 5.85 | 6.71 | 6.05 | 1.05 | 100 | 4.86E−03 | −3.58 | 12 |
| hsa-asg-13294 | 4.20 | 4.47 | 4.42 | 0.15 | 0 | 2.90E−03 | 1.15 | 2 |
| hsa-asg-13279 | 2.65 | 3.75 | 4.44 | 1.59 | 25 | 7.86E−03 | 4.09 | 17 |
| hsa-asg-13270 | 2.65 | −0.28 | 1.77 | 1.47 | 0 | 2.67E−02 | 3.71 | 13 |
| hsa-asg-13260 | 10.10 | 10.32 | 10.16 | 0.16 | 100 | 1.99E−02 | 0.68 | 2 |
| hsa-asg-1324 | 1.53 | 2.79 | 2.55 | 0.70 | 0 | 6.33E−03 | 1.92 | 4 |
| hsa-asg-13237 | 8.56 | 9.37 | 9.06 | 0.35 | 100 | 5.66E−03 | 1.00 | 2 |
| hsa-asg-13230 | 4.06 | 6.49 | 4.65 | 1.48 | 50 | 4.73E−02 | 2.55 | 6 |
| hsa-asg-13203 | 9.12 | 7.01 | 8.35 | 1.00 | 100 | 1.22E−03 | −4.19 | 18 |
| hsa-asg-13166 | 2.55 | 3.52 | 2.67 | 0.61 | 25 | 3.03E−02 | 2.40 | 5 |
| hsa-asg-13143 | 14.62 | 14.37 | 14.42 | 0.15 | 100 | 1.87E−02 | 0.47 | 1 |
| hsa-asg-13097 | 2.65 | 4.01 | 3.53 | 1.65 | 25 | 2.41E−03 | 5.62 | 49 |
| hsa-asg-13091 | 9.34 | 9.37 | 9.61 | 0.31 | 100 | 8.59E−03 | −0.84 | 2 |
| hsa-asg-13079 | 11.86 | 11.80 | 11.77 | 0.08 | 0 | 1.36E−02 | −0.32 | 1 |
| hsa-asg-1306 | 7.37 | 8.13 | 7.89 | 0.40 | 0 | 2.98E−02 | −1.12 | 2 |
| hsa-asg-13051 | 3.43 | 2.92 | 2.90 | 0.48 | 0 | 4.33E−02 | 1.11 | 2 |
| hsa-asg-12996 | 8.98 | 8.59 | 8.71 | 0.18 | 100 | 1.01E−02 | 0.59 | 2 |
| hsa-asg-12973 | 4.38 | 5.15 | 4.73 | 0.71 | 75 | 4.29E−02 | 1.42 | 3 |
| hsa-asg-12946 | 12.10 | 11.87 | 11.96 | 0.19 | 100 | 3.45E−03 | −0.65 | 2 |
| hsa-asg-12943 | 3.05 | 3.44 | 3.24 | 0.32 | 0 | 3.08E−03 | 1.21 | 2 |
| hsa-asg-12941 | 8.98 | 8.63 | 8.96 | 0.36 | 100 | 1.93E−02 | −0.78 | 2 |
| hsa-asg-12937 | 11.39 | 11.14 | 11.29 | 0.12 | 100 | 8.03E−03 | 0.40 | 1 |
| hsa-asg-12930 | 2.74 | 4.55 | 3.43 | 1.35 | 50 | 4.51E−02 | −2.17 | 5 |
| hsa-asg-12919 | 13.30 | 13.02 | 13.20 | 0.16 | 100 | 3.97E−03 | −0.55 | 1 |
| hsa-asg-12897 | 7.44 | 6.92 | 7.18 | 0.26 | 0 | 1.43E−02 | 0.67 | 2 |
| hsa-asg-12880 | 10.14 | 9.98 | 10.22 | 0.30 | 100 | 1.29E−02 | −0.73 | 2 |
| hsa-asg-12842 | 6.11 | 5.07 | 6.02 | 0.78 | 100 | 3.77E−02 | −2.38 | 5 |
| hsa-asg-12821 | 4.02 | 4.42 | 4.28 | 0.18 | 0 | 4.33E−03 | 1.42 | 3 |
| hsa-asg-12807 | 3.05 | 3.52 | 3.28 | 1.19 | 0 | 3.67E−02 | 2.03 | 4 |
| hsa-asg-12799 | 7.05 | 6.96 | 7.22 | 0.70 | 0 | 2.43E−02 | 1.48 | 3 |
| hsa-asg-12775 | 12.08 | 11.63 | 11.93 | 0.24 | 100 | 3.49E−03 | −0.75 | 2 |
| hsa-asg-12746 | 4.26 | 4.01 | 3.79 | 0.69 | 75 | 3.81E−02 | 1.21 | 2 |
| hsa-asg-12734 | 7.51 | 6.51 | 7.13 | 0.51 | 100 | 1.71E−02 | 1.28 | 2 |
| hsa-asg-12653 | 6.59 | 5.18 | 5.66 | 0.72 | 25 | 1.28E−02 | 1.67 | 3 |
| hsa-asg-12605 | 7.84 | 7.16 | 7.67 | 0.54 | 50 | 9.02E−03 | 1.51 | 3 |
| hsa-asg-12602 | 1.53 | 1.94 | 1.66 | 0.19 | 0 | 2.23E−03 | 0.67 | 2 |
| hsa-asg-12595 | 9.50 | 8.96 | 9.36 | 0.27 | 100 | 1.02E−02 | −0.99 | 2 |
| hsa-asg-12581 | 10.71 | 11.12 | 11.09 | 0.26 | 100 | 1.94E−02 | −0.54 | 1 |
| hsa-asg-12503 | 6.51 | 4.85 | 5.25 | 0.86 | 25 | 4.01E−02 | −2.16 | 4 |
| hsa-asg-12485 | 3.05 | 3.95 | 3.34 | 0.41 | 0 | 3.79E−02 | 1.09 | 2 |
| hsa-asg-12464 | 2.11 | 2.15 | 2.09 | 0.19 | 0 | 2.58E−02 | 0.36 | 1 |
| hsa-asg-12443 | 3.05 | 2.65 | 2.71 | 0.25 | 25 | 5.81E−03 | 0.94 | 2 |
| hsa-asg-12441 | 10.86 | 10.80 | 10.89 | 0.13 | 100 | 2.15E−03 | −0.80 | 2 |
| hsa-asg-1243 | 7.58 | 7.71 | 7.70 | 0.10 | 25 | 2.07E−03 | −0.96 | 2 |
| hsa-asg-12424 | 9.92 | 9.46 | 9.50 | 0.30 | 75 | 1.00E−02 | 0.92 | 2 |
| hsa-asg-12421 | 9.58 | 9.73 | 9.86 | 0.26 | 100 | 4.76E−02 | −0.95 | 2 |
| hsa-asg-12403 | 4.74 | 4.47 | 4.53 | 0.17 | 100 | 1.60E−02 | 0.62 | 2 |
| hsa-asg-12386 | 8.22 | 8.24 | 8.41 | 0.21 | 0 | 2.61E−02 | −0.91 | 2 |
| hsa-asg-12331 | 7.50 | 7.32 | 7.61 | 0.26 | 100 | 3.89E−02 | −1.52 | 3 |
| hsa-asg-12330 | 3.90 | 4.38 | 4.22 | 0.25 | 0 | 3.95E−02 | 0.98 | 2 |
| hsa-asg-1233 | 11.48 | 11.17 | 11.44 | 0.22 | 0 | 4.43E−02 | −0.44 | 1 |
| hsa-asg-12309 | 10.02 | 10.47 | 10.11 | 0.24 | 100 | 5.07E−03 | 0.70 | 2 |
| hsa-asg-12302 | 7.61 | 8.10 | 8.17 | 0.54 | 0 | 1.52E−02 | 1.25 | 2 |
| hsa-asg-12297 | 9.75 | 10.00 | 9.58 | 0.40 | 100 | 2.88E−03 | 1.37 | 3 |
| hsa-asg-12289 | 12.12 | 12.08 | 12.18 | 0.16 | 100 | 2.63E−02 | −0.34 | 1 |
| hsa-asg-12278 | 9.68 | 9.53 | 9.73 | 0.16 | 100 | 1.25E−02 | 0.68 | 2 |
| hsa-asg-1227 | 6.61 | 6.73 | 6.53 | 0.22 | 100 | 6.72E−03 | −1.18 | 2 |
| hsa-asg-12247 | 12.22 | 12.05 | 12.14 | 0.07 | 75 | 2.33E−02 | 0.19 | 1 |
| hsa-asg-12244 | 8.18 | 7.60 | 7.76 | 0.28 | 0 | 8.40E−03 | 1.15 | 2 |
| hsa-asg-12119 | 5.75 | 4.23 | 3.80 | 1.57 | 50 | 3.77E−02 | 2.66 | 6 |
| hsa-asg-12096 | 2.74 | 2.50 | 2.80 | 0.39 | 0 | 2.44E−02 | 0.78 | 2 |
| hsa-asg-12058 | 6.94 | 7.80 | 7.42 | 0.47 | 100 | 2.15E−02 | −1.51 | 3 |
| hsa-asg-12049 | 9.51 | 9.65 | 9.53 | 0.08 | 100 | 1.32E−05 | 0.96 | 2 |
| hsa-asg-12027 | 2.45 | 1.94 | 2.71 | 0.70 | 0 | 6.77E−03 | 1.94 | 4 |
| hsa-asg-1201 | 10.33 | 9.96 | 10.25 | 0.22 | 100 | 1.73E−02 | −0.52 | 1 |
| hsa-asg-11997 | 3.54 | 4.38 | 4.25 | 0.63 | 0 | 4.46E−02 | 1.20 | 2 |
| hsa-asg-11982 | 8.71 | 8.25 | 8.41 | 0.38 | 0 | 2.22E−02 | 1.18 | 2 |
| hsa-asg-11975 | 10.43 | 10.39 | 10.42 | 0.15 | 100 | 5.08E−03 | −0.45 | 1 |
| hsa-asg-11962 | 8.54 | 8.65 | 8.58 | 0.05 | 100 | 2.77E−02 | 0.42 | 1 |
| hsa-asg-11956 | 8.38 | 8.20 | 8.43 | 0.21 | 0 | 3.25E−03 | 0.79 | 2 |
| hsa-asg-11946 | 9.63 | 9.66 | 9.81 | 0.23 | 100 | 8.88E−03 | 0.77 | 2 |
| hsa-asg-11940 | 8.34 | 8.52 | 8.51 | 0.11 | 100 | 2.12E−03 | 0.50 | 1 |
| hsa-asg-11912 | 5.97 | 6.72 | 5.04 | 1.54 | 50 | 2.84E−02 | 2.82 | 7 |
| hsa-asg-1189 | 8.28 | 8.12 | 8.26 | 0.60 | 75 | 1.18E−02 | 1.43 | 3 |
| hsa-asg-11877 | 6.47 | 6.82 | 6.78 | 0.24 | 0 | 3.25E−02 | 0.74 | 2 |
| hsa-asg-11872 | 3.05 | 2.92 | 2.62 | 0.55 | 0 | 4.03E−02 | 2.10 | 4 |
| hsa-asg-11827 | 5.48 | 4.12 | 4.65 | 0.84 | 50 | 2.47E−02 | −1.91 | 4 |
| hsa-asg-11818 | 11.00 | 11.04 | 11.13 | 0.15 | 100 | 1.06E−03 | 0.86 | 2 |
| hsa-asg-11766 | 3.73 | 3.82 | 3.80 | 0.05 | 25 | 1.73E−02 | −0.32 | 1 |
| hsa-asg-11758 | 13.23 | 12.94 | 13.08 | 0.12 | 100 | 2.10E−02 | −0.34 | 1 |
| hsa-asg-11698 | 11.94 | 11.53 | 11.76 | 0.24 | 100 | 7.08E−03 | −0.70 | 2 |
| hsa-asg-11686 | 2.34 | 1.71 | 2.06 | 0.32 | 0 | 2.02E−02 | −0.64 | 2 |
| hsa-asg-11643 | 3.19 | 3.15 | 2.98 | 0.23 | 0 | 2.23E−03 | 1.09 | 2 |
| hsa-asg-11639 | 3.31 | 3.75 | 3.31 | 0.50 | 0 | 4.96E−02 | 0.94 | 2 |
| hsa-asg-11635 | 4.35 | 5.01 | 4.71 | 1.08 | 50 | 4.21E−02 | −2.28 | 5 |
| hsa-asg-11617 | 10.30 | 10.49 | 10.36 | 0.24 | 100 | 2.65E−02 | −0.53 | 1 |
| hsa-asg-11612 | 7.93 | 7.89 | 7.91 | 0.07 | 0 | 6.43E−03 | 1.38 | 3 |
| hsa-asg-11608 | 10.21 | 9.63 | 9.95 | 0.34 | 100 | 3.23E−03 | 1.09 | 2 |
| hsa-asg-11606 | 11.52 | 11.13 | 11.30 | 0.18 | 100 | 8.51E−03 | 0.57 | 1 |
| hsa-asg-11579 | 3.82 | 3.25 | 3.12 | 0.56 | 0 | 2.02E−03 | 2.18 | 5 |
| hsa-asg-1157 | 6.70 | 6.88 | 7.07 | 0.37 | 0 | 1.72E−03 | 1.90 | 4 |
| hsa-asg-11563 | 9.59 | 9.69 | 9.59 | 0.11 | 100 | 1.14E−02 | 1.04 | 2 |
| hsa-asg-11535 | 13.66 | 13.47 | 13.55 | 0.12 | 100 | 8.80E−03 | 0.37 | 1 |
| hsa-asg-11513 | 9.48 | 9.26 | 9.40 | 0.15 | 75 | 5.98E−04 | 0.70 | 2 |
| hsa-asg-11503 | 8.00 | 8.38 | 8.37 | 0.30 | 0 | 4.54E−02 | 0.71 | 2 |
| hsa-asg-1140 | 6.96 | 7.44 | 7.39 | 0.30 | 100 | 1.63E−02 | 0.78 | 2 |
| hsa-asg-11389 | 12.32 | 12.14 | 12.29 | 0.15 | 100 | 2.94E−03 | −0.48 | 1 |
| hsa-asg-11388 | 6.18 | 6.64 | 6.76 | 0.46 | 100 | 1.67E−02 | 0.97 | 2 |
| hsa-asg-11384 | 2.90 | 2.50 | 2.65 | 0.46 | 25 | 4.61E−02 | −0.76 | 2 |
| hsa-asg-11381 | 8.49 | 8.30 | 8.32 | 0.29 | 100 | 2.22E−02 | 0.87 | 2 |
| hsa-asg-11336 | 10.88 | 10.69 | 10.83 | 0.09 | 100 | 2.82E−02 | −0.34 | 1 |
| hsa-asg-11326 | 7.46 | 7.65 | 7.34 | 0.26 | 100 | 2.69E−02 | 0.76 | 2 |
| hsa-asg-11246 | 2.34 | 2.50 | 2.35 | 0.35 | 0 | 2.35E−02 | −0.71 | 2 |
| hsa-asg-11228 | 9.39 | 9.59 | 9.56 | 0.12 | 100 | 7.94E−03 | 0.49 | 1 |
| hsa-asg-11196 | 2.74 | 3.34 | 3.15 | 0.49 | 0 | 2.82E−02 | −0.96 | 2 |
| hsa-asg-11193 | 11.97 | 11.98 | 12.12 | 0.17 | 75 | 7.13E−03 | −0.52 | 1 |
| hsa-asg-11191 | 3.31 | 2.92 | 3.09 | 0.22 | 0 | 3.63E−03 | 0.96 | 2 |
| hsa-asg-11174 | 8.95 | 8.79 | 8.94 | 0.27 | 25 | 1.85E−02 | −0.94 | 2 |
| hsa-asg-11130 | 3.43 | 4.78 | 4.10 | 0.66 | 50 | 3.61E−03 | −2.14 | 4 |
| hsa-asg-11112 | 11.41 | 11.39 | 11.41 | 0.13 | 100 | 2.60E−02 | −0.56 | 1 |
| hsa-asg-11089 | 10.76 | 10.29 | 10.39 | 0.27 | 100 | 3.11E−02 | −0.79 | 2 |
| hsa-asg-11061 | 4.29 | 4.42 | 4.74 | 1.32 | 25 | 3.26E−02 | −2.33 | 5 |
| hsa-asg-11056 | 5.59 | 5.35 | 5.52 | 0.42 | 0 | 1.43E−02 | 0.97 | 2 |
| hsa-asg-11002 | 3.37 | 3.68 | 3.22 | 0.58 | 0 | 8.23E−03 | 2.37 | 5 |
| hsa-asg-10971 | 9.47 | 8.99 | 9.19 | 0.33 | 50 | 4.55E−02 | 0.68 | 2 |
| hsa-asg-10957 | 2.82 | 5.74 | 4.46 | 1.22 | 25 | 1.08E−02 | −3.48 | 11 |
| hsa-asg-10932 | 2.74 | 2.92 | 3.31 | 0.65 | 0 | 9.79E−03 | 1.85 | 4 |
| hsa-asg-10926 | 5.18 | 7.15 | 5.32 | 1.75 | 75 | 2.06E−02 | −3.47 | 11 |
| hsa-asg-10922 | 7.47 | 7.33 | 7.68 | 0.35 | 100 | 2.68E−02 | −1.31 | 2 |
| hsa-asg-10918 | 6.57 | 4.55 | 5.07 | 1.00 | 50 | 2.72E−02 | 2.04 | 4 |
| hsa-asg-10914 | 2.74 | 2.92 | 2.56 | 0.36 | 0 | 8.84E−03 | 1.31 | 2 |
| hsa-asg-10901 | 7.15 | 6.89 | 7.04 | 0.18 | 100 | 3.16E−02 | −0.68 | 2 |
| hsa-asg-10893 | 3.19 | 3.15 | 2.91 | 0.34 | 0 | 4.56E−03 | 1.52 | 3 |
| hsa-asg-10862 | 3.05 | 2.50 | 2.97 | 0.35 | 0 | 1.25E−03 | 1.53 | 3 |
| hsa-asg-10860 | 2.90 | 1.94 | 2.24 | 0.48 | 0 | 3.34E−02 | 1.19 | 2 |
| hsa-asg-10810 | 3.82 | 3.34 | 3.49 | 0.22 | 0 | 1.24E−03 | 1.01 | 2 |
| hsa-asg-10807 | 8.49 | 8.56 | 8.90 | 0.43 | 50 | 4.16E−02 | −0.83 | 2 |
| hsa-asg-10647 | 5.40 | 6.46 | 5.89 | 0.66 | 50 | 7.36E−03 | −2.89 | 7 |
| hsa-asg-10639 | 11.76 | 11.59 | 11.76 | 0.12 | 100 | 6.88E−03 | 0.56 | 1 |
| hsa-asg-10638 | 12.30 | 12.26 | 12.23 | 0.14 | 100 | 2.35E−02 | −0.28 | 1 |
| hsa-asg-10580 | 12.78 | 12.14 | 12.49 | 0.29 | 100 | 3.04E−03 | −1.54 | 3 |
| hsa-asg-10576 | 9.15 | 9.32 | 9.37 | 0.18 | 100 | 4.96E−03 | 1.43 | 3 |
| hsa-asg-10556 | 5.05 | 6.60 | 5.37 | 0.87 | 25 | 2.15E−02 | −1.72 | 3 |
| hsa-as -10512 | 10.57 | 10.13 | 10.41 | 0.21 | 100 | 1.97E−02 | −0.43 | 1 |
| hsa-asg-10510 | 6.24 | 6.88 | 6.82 | 0.60 | 100 | 2.95E−02 | −1.37 | 3 |
| hsa-asg-10481 | 6.14 | 4.18 | 5.51 | 0.99 | 50 | 4.42E−02 | 1.66 | 3 |
| hsa-asg-10480 | 3.98 | 4.55 | 4.69 | 1.20 | 25 | 4.19E−02 | −2.17 | 4 |
| hsa-asg-10411 | 9.71 | 9.16 | 9.86 | 0.56 | 100 | 1.72E−03 | −3.35 | 10 |
| hsa-asg-1038 | 5.99 | 6.76 | 6.84 | 0.86 | 100 | 2.24E−03 | −2.99 | 8 |
| hsa-asg-10371 | 1.53 | 0.89 | 1.32 | 0.43 | 0 | 3.85E−03 | 1.57 | 3 |
| hsa-asg-10273 | 4.29 | 6.01 | 5.70 | 0.96 | 75 | 1.11E−02 | −2.83 | 7 |
| hsa-asg-10263 | 3.64 | 2.33 | 2.64 | 0.67 | 0 | 5.97E−03 | 1.92 | 4 |
| hsa-asg-1026 | 5.74 | 5.85 | 5.66 | 0.17 | 100 | 2.58E−02 | −0.45 | 1 |
| hsa-asg-10256 | 3.82 | 3.04 | 3.76 | 0.78 | 25 | 3.64E−02 | −1.66 | 3 |
| hsa-asg-10247 | 2.11 | 1.94 | 2.15 | 0.22 | 0 | 1.28E−02 | 1.42 | 3 |
| hsa-asg-10235 | 5.48 | 5.25 | 5.78 | 0.49 | 100 | 1.02E−02 | −1.46 | 3 |
| hsa-asg-10231 | 1.19 | 3.34 | 2.62 | 1.21 | 0 | 2.15E−02 | 2.41 | 5 |
| hsa-asg-10229 | 3.90 | 3.15 | 3.33 | 0.57 | 0 | 1.68E−02 | 1.47 | 3 |
| hsa-asg-10222 | 4.50 | 4.18 | 4.00 | 0.42 | 50 | 2.08E−02 | 0.92 | 2 |
| hsa-asg-10199 | 9.37 | 9.34 | 9.51 | 0.20 | 75 | 3.44E−03 | 0.77 | 2 |
| hsa-asg-10197 | 9.58 | 9.55 | 9.52 | 0.22 | 75 | 1.60E−02 | 0.68 | 2 |
| hsa-asg-10195 | 8.54 | 7.80 | 8.36 | 0.51 | 100 | 5.46E−03 | 1.47 | 3 |
| hsa-asg-10181 | 9.50 | 9.55 | 9.72 | 0.24 | 100 | 2.65E−03 | −1.18 | 2 |
| hsa-asg-1018 | 6.65 | 6.67 | 6.60 | 0.30 | 100 | 1.95E−02 | 1.17 | 2 |
| hsa-asg-10170 | 5.09 | 4.91 | 4.46 | 0.67 | 0 | 4.69E−02 | 1.46 | 3 |
| hsa-asg-10158 | 3.86 | 4.28 | 4.09 | 0.28 | 0 | 9.61E−03 | 2.27 | 5 |
| hsa-asg-10141 | 2.55 | 3.44 | 3.13 | 0.73 | 25 | 1.68E−02 | −1.95 | 4 |
| hsa-asg-10081 | 2.90 | 2.50 | 2.26 | 0.58 | 0 | 2.42E−02 | 1.63 | 3 |
| hsa-asg-10076 | 9.78 | 9.54 | 9.65 | 0.18 | 100 | 1.30E−02 | 0.59 | 2 |
| hsa-asg-10037 | 6.34 | 5.15 | 5.93 | 0.80 | 100 | 3.17E−02 | −1.41 | 3 |
| hsa-asg-1001 | 8.78 | 9.48 | 9.23 | 0.31 | 100 | 1.05E−03 | 1.38 | 3 |
| hsa-miR-140 | 4.79 | 5.51 | 4.85 | 1.83 | 25 | 2.11E−02 | 3.71 | 13 |
| hsa-miR-29b | 8.96 | 9.82 | 9.14 | 0.69 | 100 | 1.93E−03 | 2.55 | 6 |
| hsa-miR-329 | 2.55 | 1.94 | 1.98 | 0.40 | 0 | 3.19E−02 | 3.83 | 14 |
| hsa-miR-329 | 2.55 | 3.60 | 2.97 | 0.78 | 0 | 6.61E−03 | 3.59 | 12 |
| hsa-miR-365 | 2.55 | 2.33 | 2.05 | 0.58 | 0 | 4.53E−04 | 5.11 | 34 |
| hsa-miR-369- | 2.65 | 2.65 | 2.29 | 0.63 | 0 | 1.63E−03 | 3.79 | 14 |
| 5p | | | | | | | | |
| hsa-miR-376a | 1.84 | 3.34 | 2.90 | 0.80 | 0 | 7.07E−04 | 4.59 | 24 |
| hsa-miR-376a | 2.11 | 1.46 | 1.75 | 0.28 | 0 | 1.02E−03 | 4.20 | 18 |
| hsa-miR-421 | 1.53 | 4.07 | 2.67 | 1.50 | 0 | 3.41E−03 | 4.79 | 28 |
| hsa-miR-451 | 8.72 | 7.76 | 8.78 | 0.73 | 100 | 6.76E−05 | 5.32 | 40 |
| hsa-miR-497 | 8.38 | 9.13 | 8.49 | 0.45 | 0 | 4.09E−05 | 4.08 | 17 |
| hsa-miR-517a | 1.98 | 1.46 | 1.90 | 0.35 | 0 | 5.22E−05 | 5.00 | 32 |
| hsa-miR-551b | 2.90 | 3.68 | 2.73 | 1.29 | 0 | 6.93E−04 | 5.88 | 59 |
| hsa-miR-99b | 8.73 | 8.43 | 8.45 | 0.24 | 0 | 6.16E−06 | 3.03 | 8 |
| hsa-miR- | 10.54 | 10.96 | 10.44 | 0.50 | 100 | 8.60E−05 | 3.63 | 12 |
| 199a* | | | | | | | | |
| hsa-miR-224 | 5.53 | 5.98 | 5.30 | 0.58 | 100 | 1.37E−05 | 6.62 | 98 |

SD, standard deviation;
%, percentage of samples expressing miRNA above background levels;
Log2Diff, difference in VSN-transformed expression between NBr and LNneg samples.

### Example 42

### Common miRNAs Differentially Expressed between Normal Breast Tissue Samples and Cancer-negative Axillary Lymph Nodes and between Cancer-positive and Cancer-negative Axillary Lymph Nodes from Breast Cancer Patients

[0360] The inventors determined the common miRNAs that are differentially expressed between normal breast tissue (NBr) samples and cancer-negative axillary lymph nodes (LNneg) (identified in Example 41) and between cancer-positive (LNpos) and cancer-negative (LNneg) axillary lymph nodes from breast cancer patients (identified in Example 40). For this analysis, differentially expressed miRNAs were identified, using a p-value<0.05 and a fold-change>2 (Table 39 and Table 40). These miRNAs represent particularly useful biomarkers for monitoring the presence of breast cancer metastasis to axillary lymph nodes.

[0361] Among the 50 verified miRNAs expressed at higher levels in LNpos than in LNneg samples, 45 also had average levels of expression higher in NBr tissues than in LNneg samples (Table 41). Among these, five miRNAs (hsa-miR-200b, -200a, -141, -200c, and -182) had a level of expression between 50- and 500-fold lower in LNneg than their average level of expression in either NBr or LNpos samples.

TABLE 41
miRNAs differentially expressed between both normal breast
(NBr) tissue samples and cancer-negative axillary lymph
nodes (LNneg) and between cancer-positive (LNpos) and
cancer-negative (LNneg) axillary lymph nodes.

| | | Fold | Fold |
|---|---|---|---|
| | | Change | Change |
| | | (NBr vs | (LNpos vs |
| Probe ID | MicroRNA | LNneg) | LNneg) |
| hsa-miR-375_st1 | hsa-miR-375 | 24 | 325 |
| hsa-miR-200b_st1 | hsa-miR-200b | 499 | 322 |
| hsa-miR-141_st1 | hsa-miR-141 | 162 | 132 |
| hsa-miR-200a_st2 | hsa-miR-200a | 174 | 107 |
| hsa-miR-182_st1 | hsa-miR-182 | 55 | 84 |
| hsa-miR-200c_st1 | hsa-miR-200c | 65 | 56 |
| hsa-miR-203_st2 | hsa-miR-203 | 19 | 32 |
| hsa-miR-429_st1 | hsa-miR-429 | 39 | 17 |
| hsa-miR-542-5p_st2 | hsa-miR-542-5p | 16 | 12 |
| hsa-miR-421-3p_st1 | hsa-miR-421 | 35 | 12 |
| hsa-miR-181d_st1 | hsa-miR-181d | 8 | 9 |
| hsa-miR-213_st1 | hsa-miR-181a* | 12 | 9 |
| hsa-miR-489_st2 | hsa-miR-489 | 21 | 9 |
| hsa-miR-224_st2 | hsa-miR-224 | 86 | 8 |
| hsa-miR-34b_st2 | hsa-miR-34b | 6 | 8 |
| hsa-miR-21_st2 | hsa-miR-21 | 10 | 7 |
| hsa-miR-218_st2 | hsa-miR-218 | 68 | 6 |
| hsa-miR-30a-3p_st1 | hsa-miR-30a-3p | 27 | 5 |
| hsa-asg-14166_st2 | hsa-miR-425-5p | 4 | 5 |
| hsa-miR-189_st1 | hsa-miR-189 | 36 | 4 |
| hsa-miR-148a_st1 | hsa-miR-148a | 15 | 4 |
| hsa-miR-148b_st2 | hsa-miR-148b | 22 | 4 |
| hsa-miR-193a_st1 | hsa-miR-193a | 11 | 4 |
| hsa-miR-106b_st2 | hsa-miR-106b | 12 | 4 |
| hsa-miR-376a_st2 | hsa-miR-376a | 17 | 4 |
| hsa-miR-452_st1 | hsa-miR-452 | 48 | 3 |
| hsa-miR-98_st1 | hsa-miR-98 | 18 | 3 |
| hsa-miR-34a_st1 | hsa-miR-34a | 5 | 3 |
| hsa-miR-27a_st2 | hsa-miR-27a | 17 | 3 |
| hsa-miR-128a_st2 | hsa-miR-128a | 10 | 3 |
| hsa-miR-93_st2 | hsa-miR-93 | 9 | 3 |
| hsa-miR-22_st1 | hsa-miR-22 | 22 | 3 |
| hsa-miR-151_st2 | hsa-miR-151 | 9 | 2 |
| hsa-miR-30e-5p_st2 | hsa-miR-30e-5p | 12 | 2 |
| hsa-miR-30a-5p_st2 | hsa-miR-30a-5p | 12 | 2 |
| hsa-miR-99b_st1 | hsa-miR-99b | 8 | 2 |
| hsa-miR-191_st2 | hsa-miR-191 | 3 | 2 |
| hsa-miR-107_st2 | hsa-miR-107 | 6 | 2 |
| hsa-miR-130b_st1 | hsa-miR-130b | 3 | 2 |
| hsa-miR-181a_st1 | hsa-miR-181a | 3 | 2 |
| hsa-miR-24_st1 | hsa-miR-24 | 8 | 2 |
| hsa-miR-199a_st2 | hsa-miR-199a | 9 | 2 |
| hsa-miR-103_st1 | hsa-miR-103 | 5 | 2 |
| hsa-miR-25_st2 | hsa-miR-25 | 6 | 2 |
| hsa-miR-363_st2 | hsa-miR-363 | 5 | 2 |

### Example 43

### qRT-PCR Verification of Differentially Expressed miRNAs in Normal Breast Tissue and Cancer-positive and Cancer-negative Lymph Nodes from Breast Cancer Patients

[0362] The inventors also evaluated the differential expression of selected miRNAs (identified in Example 40 and Example 41) in LNpos and LNneg samples from breast cancer patients (Table 38, Example 40), by qRT-PCR. qRT-PCR reactions were performed using Taqman® MicroRNA Assays (Applied Biosystems; Foster City, Calif., USA) specific for eleven miRNAs differentially expressed between LNpos and LNneg and between NBr and LNneg samples (hsa-miR-200b, -200a, -203, -182, -200c, -429, -141, -375, -196a, -205, and -183). Assays were performed according to the manufacturer's instructions with 15 ng of input total RNA from the seven samples (LNpos2-4 and LNneg1-4). Reactions were incubated in a 7900HT Real-Time PCR system (Applied Biosystems, Foster City, Calif., USA). Initial data analysis was done using the 7500 Fast System SDS V2.3 software (Applied Biosystems). miR-638, whose expression level did not change between the different samples, was used for normalization. Results of qRT-PCR expression analysis for the eleven miRNAs were compared with those obtained from microarray expression analysis (FIG. 13A, FIG. 13B) and confirmed the microarray results. Interestingly, the average expression level of hsa-miR-205 was higher in only two (LNpos2 and 3) of the three positive lymph node samples compared to the LNneg samples. In one positive lymph node (LNpos4), however, the average expression level of miR-205 was reduced compared to that observed in negative lymph nodes, indicating some heterogeneity in the expression of miR-205 in metastatic axillary lymph nodes of breast cancer patients.

### Example 44

### Microarray Analysis of miRNAs Differentially Expressed between a Distinct Group of Cancer-positive and Cancer-negative Lymph Nodes from Breast Cancer Patients

[0363] A second and independent set of FFPE samples often cancer-positive (LNpos5-14) and five cancer-negative (LNneg5-9) axillary lymph nodes from ductal breast cancer patients were purchased from ProteoGenex (ProteoGenex, Inc.; Culver City, Calif., USA) (Table 42). A pathology report and hematoxilin-eosin (H&E)-stained slides were available for each lymph node sample. H&E slides were reviewed by a pathologist at Asuragen to confirm lymph node statuses as cancer cell-positive or cancer cell-negative.

TABLE 42
Patient and tissue sample pathology information for ten cancer-positive (LNpos) and
five cancer-negative (LNneg) axillary lymph nodes from 15 independent ductal breast cancer
patients. TNM stage (Sobin and Wittekind, 2002); AJCC Stage (Greene, 2002); LN Mets,
number of lymph nodes with metastases/total number of lymph nodes examined.

| | LN | | Patient | Patient's | | | | |
|---|---|---|---|---|---|---|---|---|
| Sample | Cancer | | Age (yr) | Histological | Tumor | TNM | AJCC | LN |
| ID | Diagnosis | Sex | Ethnicity | Diagnosis | size (cm) | Stage | Stage | Mets |
| LNpos5 | metastatic | F | 65 | infiltrating | 4.3 × 3 × 2.2 | T2N2M0 | IIIA | 7/10 |
| | | | Caucasian | ductal | | | | |
| | | | | carcinoma | | | | |
| LNpos6 | metastatic | F | 73 | infiltrating | 4 × 2 × 3.5 | T4bN2M0 | IIIB | 11/11 |
| | | | Caucasian | ductal | | | | |
| | | | | carcinoma | | | | |
| LNpos7 | metastatic | F | 54 | infiltrating | 3 × 2.3 × 1.5 | T2N1M0 | IIB | 2/22 |
| | | | Caucasian | ductal | | | | |
| | | | | carcinoma | | | | |
| LNpos8 | metastatic | F | 44 | infiltrating | 4.5 × 4.5 × 2.3 | T2N2M0 | IIIA | 12/18 |
| | | | Caucasian | ductal | | | | |
| | | | | carcinoma | | | | |
| LNpos9 | metastatic | F | 44 | infiltrating | 5 × 3 × 4.5 | T2N2M0 | IIIA | 9/16 |
| | | | Caucasian | ductal | | | | |
| | | | | carcinoma | | | | |
| LNpos10 | metastatic | F | 42 | infiltrating | 2.5 × 3.2 × 1.6 | T2N1M0 | IIB | 3/13 |
| | | | Caucasian | ductal | | | | |
| | | | | carcinoma | | | | |
| LNpos11 | metastatic | F | 69 | infiltrating | 5.5 × 3 × 2.5 | T3N2M0 | IIIA | 13/37 |
| | | | Caucasian | ductal | | | | |
| | | | | carcinoma | | | | |
| LNpos12 | metastatic | F | 44 | infiltrating | 5 × 4.5 × 4 | T2N2M0 | IIIA | 6/13 |
| | | | Caucasian | ductal | | | | |
| | | | | carcinoma | | | | |
| LNpos13 | metastatic | F | 54 | infiltrating | 1.8 × 3 × 1; | T2N2M0 | IIIA | 7/15 |
| | | | Caucasian | ductal | 5 × 3.7 × 3.5 | | | |
| | | | | carcinoma | | | | |
| LNpos14 | metastatic | F | 46 | infiltrating | 2.8 × 2.5 × 2.7 | T2N1M0 | IIB | 2/5 |
| | | | Caucasian | ductal | | | | |
| | | | | carcinoma | | | | |
| LNneg5 | normal | F | 50 | infiltrating | 3 | T2N0M0 | IIA | 0/9 |
| | | | Caucasian | ductal | | | | |
| | | | | carcinoma | | | | |
| LNneg6 | normal | F | 50 | infiltrating | 2.3 | T2N1M0 | IIB | 1/4 |
| | | | Caucasian | ductal | | | | |
| | | | | carcinoma | | | | |
| LNneg7 | normal | F | 60 | infiltrating | N/A | T1N1M0 | IIA | 2/6 |
| | | | Caucasian | ductal | | | | |
| | | | | carcinoma | | | | |
| LNneg8 | normal | F | 35 | infiltrating | 2.5 | T2N1M0 | IIB | 2/12 |
| | | | Caucasian | ductal | | | | |
| | | | | carcinoma | | | | |
| LNneg9 | normal | F | 49 | infiltrating | 3.2 × 3 × 2.3 | T2N1M0 | IIB | 2/9 |
| | | | Caucasian | ductal | | | | |
| | | | | carcinoma | | | | |

[0364] Total RNA isolation from the FFPE lymph node samples was performed using the RecoverAll™ Total Nucleic Acid Isolation Kit (cat. No. AM1975; Ambion, Inc.; Austin, Tex., USA), as described above in Example 1 and analyzed on miRNA microarrays, as described below.

[0365] These samples were evaluated using the Agilent Human miRNA Microarray (V2) (Agilent Technologies, Inc.; Santa Clara, Calif. USA), which contains probes for 723 human and 76 human viral microRNAs from the miRBase database V.10.1 (Griffiths-Jones et al., 2006). Array hybridization, washing, staining, imaging, and signal extraction were performed according to Agilent's recommended procedures, as explained below.

[0366] miRNA array expression analysis: Samples for miRNA profiling studies were processed by Asuragen Services (Asuragen, Inc.; Austin, Tex., USA). Total RNA from each sample (100 ng) was dephosphorylated and a pCp-Cy3 labeling molecule was ligated to the 3′ end of the RNA molecules, following the manufacturer's recommendations (Agilent Technologies, Inc. Santa Clara, USA). The labeled RNA was purified using a Bio-Spin P-6 column (Bio-Rad Laboratories Inc.; Hercules, Calif., USA).

[0367] miRNA array signal processing: The signal processing implemented for the Agilent miRNA array is a multi-step process involving probe specific signal detection calls, background correction, and global normalization. For each probe, the contribution of signal due to background was estimated and removed by the Agilent Feature Extraction software as part of the data file output. Similarly, detection calls were based on the Agilent Feature Extraction software. Arrays within a specific analysis experiment were normalized together according to the VSN method described elsewhere (Huber et al., 2002).

[0368] Background estimate and correction and probe detection: Three types of data are provided to evaluate each hybridization. The “Total Gene Signal” is the total probe signal multiplied by the number of probes per gene and is calculated after the background effects have been accounted for. The “Total Gene Error” is the square root of the square of the total probe error multiplied by the number of probes per gene. The “Total Probe Error” is the robust average for each replicated probe multiplied by the total number of probe replicates. The “Detection Call” is a binary number that indicates if the gene was detected on the miRNA microarray. Probes detected at least once across all samples in the experiment were considered for statistical analysis.

[0369] Global normalization: The inventors have found that the Variance Stabilization Normalization (VSN) algorithm provides an ideal balance of accuracy and precision while optimizing sensitivity and specificity of signal. One advantage of VSN, is that it accommodates negative values by using the generalized log₂ transformation.

[0370] Generalized log₂ transformed: The post-normalized data scale is reported as generalized log₂ data. The distribution of microarray data is typically log normal (i.e., it tends to follow a normal distribution pattern after log transformation). A normal distributed data is amendable to classical statistical treatments, including t-tests and one-way or two-way ANOVA.

[0371] For statistical hypothesis testing, a two-sample t-test, with assumption of equal variance, was applied. This test is used to define which probes are considered to be significantly differentially expressed, or “significant”, based on false discovery rate set at 0.05.

[0372] LNpos5-14 and LNneg5-9 lymph node specimens from breast cancer patients were evaluated. A total of 204 human miRNAs were expressed above background level in the LNpos samples, representing 28% of the human miRNAs present on the arrays. A total of 176 human miRNAs were expressed above background level in the LNneg samples, representing 24% of the human miRNAs present on the arrays.

[0373] A total of 61 miRNAs were significantly differentially expressed between LNpos and LNneg samples (Table 43). Among these, 54 miRNA had average expression levels higher in LNpos compare to LNneg samples. Three miRNAs (hsa-miR-200c, -141, and -200b) had average expression levels between 170- and 400-fold higher in LNpos, six miRNAs (hsa-miR-183, -200a, -375, -429, -205, and -96) had average expression levels between 20- and 65-higher in LNpos, and nine miRNAs (hsa-miR-196a, -21, -200a*, -21*, -210, -200b*, -503, -301a, -and -425) had average expression levels between 5- and 10-fold higher in LNpos. A total of three miRNAs (hsa-miR-150, -139-5p, and -139-3p) had average expression levels between 2- and 5-fold lower in LNpos than in LNneg samples.

TABLE 43
miRNAs differentially expressed between five cancer-negative (LNneg5-9) lymph nodes and ten
cancer-positive (LNpos5-14) lymph nodes from breast cancer patients, following microarray
expression analysis.

| Probe ID | LNneg | | | | | | | | LNpos | | | | |
|---|---|---|---|---|---|---|---|---|---|---|---|---|---|
| miRNA | 5 | 6 | 7 | 8 | 9 | Mean | SD | % | 5 | 6 | 7 | 8 | 9 |
| hsa-miR-200c | −1.5 | −2.5 | −2.2 | 2.46 | −1.4 | −1.0 | 2.01 | 20 | 7.41 | 8.41 | 9.27 | 7.41 | 7.82 |
| hsa-miR-141 | −0.7 | −1.8 | −1.0 | 1.32 | −0.4 | −0.5 | 1.16 | 0 | 7.49 | 7.98 | 9.42 | 7.00 | 7.15 |
| hsa-miR-200b | −0.5 | −2.3 | −0.6 | 2.25 | −1.0 | −0.4 | 1.68 | 20 | 7.99 | 8.53 | 7.40 | 5.66 | 6.00 |
| hsa-miR-183 | −0.6 | 0.12 | −0.9 | 0.43 | −0.3 | −0.2 | 0.56 | 0 | 5.52 | 6.05 | 7.75 | 4.73 | 4.06 |
| hsa-miR-200a | −2.1 | −1.5 | −0.8 | −0.9 | −0.7 | −1.2 | 0.57 | 0 | 5.24 | 6.72 | 4.25 | 3.16 | 3.57 |
| hsa-miR-375 | −2.0 | −2.2 | −2.2 | 1.21 | −2.2 | −1.5 | 1.52 | 0 | 5.21 | 5.64 | 1.68 | 2.42 | 3.98 |
| hsa-miR-429 | −1.6 | −0.9 | −0.8 | −0.4 | −1.1 | −1.0 | 0.42 | 0 | 4.64 | 5.87 | 4.34 | 3.13 | 2.77 |
| hsa-miR-205 | −0.1 | −1.0 | −0.8 | 1.36 | −0.2 | −0.1 | 0.95 | 0 | 5.37 | 5.33 | −0.2 | 5.45 | 0.56 |
| hsa-miR-96 | −0.5 | 0.90 | 0.46 | 0.23 | 0.79 | 0.37 | 0.57 | 0 | 4.60 | 4.78 | 6.14 | 3.98 | 2.21 |
| hsa-miR-196a | 0.97 | 1.25 | 2.73 | 2.84 | 0.74 | 1.71 | 1.00 | 40 | 6.11 | 6.45 | 6.65 | 6.29 | 0.98 |
| hsa-miR-21 | 8.46 | 7.47 | 7.90 | 8.05 | 8.68 | 8.11 | 0.47 | 100 | 11.7 | 11.6 | 11.1 | 12.3 | 10.9 |
| hsa-miR- | −0.5 | −1.8 | −2.1 | −0.5 | −1.0 | −1.2 | 0.74 | 0 | 2.96 | 3.89 | 2.82 | 1.23 | 1.56 |
| 200a* | | | | | | | | | | | | | |
| hsa-miR-21* | 0.86 | −1.0 | 0.59 | 1.17 | 1.54 | 0.63 | 1.00 | 0 | 4.00 | 3.56 | 3.49 | 4.81 | 4.65 |
| hsa-miR-210 | 2.25 | 1.76 | 2.34 | 2.70 | 2.74 | 2.36 | 0.40 | 80 | 6.76 | 6.61 | 6.46 | 3.99 | 5.26 |
| hsa-miR- | −0.9 | −2.4 | −1.5 | −1.1 | −1.8 | −1.5 | 0.59 | 0 | 1.62 | 3.28 | 1.60 | 0.63 | 0.70 |
| 200b* | | | | | | | | | | | | | |
| hsa-miR-503 | −1.3 | −1.2 | −1.6 | −1.0 | −1.1 | −1.2 | 0.22 | 0 | 1.68 | 1.36 | 0.91 | 3.31 | 1.04 |
| hsa-miR-301a | 0.21 | −0.4 | −0.1 | 0.18 | 0.21 | 0.02 | 0.28 | 0 | 3.54 | 4.39 | 4.85 | 4.42 | 2.70 |
| hsa-miR-425 | 3.05 | 2.79 | 2.29 | 2.95 | 3.01 | 2.82 | 0.31 | 100 | 5.04 | 4.75 | 4.82 | 5.92 | 5.65 |
| hsa-miR-193b | 3.21 | 2.91 | 2.97 | 3.64 | 3.34 | 3.21 | 0.29 | 100 | 5.93 | 7.23 | 6.08 | 5.40 | 5.83 |
| hsa-miR-130b | 3.06 | 1.91 | 2.36 | 2.88 | 3.20 | 2.68 | 0.54 | 100 | 4.82 | 4.89 | 6.51 | 4.74 | 5.07 |
| hsa-miR-151 | 1.76 | 1.30 | 1.61 | 2.14 | 2.06 | 1.77 | 0.34 | 40 | 4.74 | 4.32 | 5.15 | 3.50 | 4.56 |
| 3p | | | | | | | | | | | | | |
| hsa-miR-203 | −0.6 | −0.9 | −1.3 | −1.0 | −0.2 | −0.8 | 0.41 | 0 | 2.67 | 1.92 | 0.61 | 1.41 | −0.3 |
| hsa-miR-93 | 3.47 | 2.28 | 2.56 | 3.29 | 3.43 | 3.01 | 0.55 | 100 | 5.13 | 5.33 | 6.47 | 5.04 | 5.17 |
| hsa-miR-454 | 0.02 | −1.3 | −1.0 | −0.2 | 0.45 | −0.4 | 0.73 | 0 | 2.44 | 2.07 | 2.41 | 3.19 | 1.18 |
| hsa-miR-106b | 5.60 | 4.29 | 4.70 | 5.24 | 5.44 | 5.06 | 0.54 | 100 | 6.76 | 7.57 | 8.18 | 7.38 | 7.15 |
| hsa-miR-324- | 3.00 | 1.38 | 2.52 | 2.81 | 2.86 | 2.52 | 0.66 | 80 | 4.48 | 4.76 | 5.98 | 4.46 | 5.05 |
| 5p | | | | | | | | | | | | | |
| hsa-miR- | 2.62 | 1.73 | 2.78 | 2.52 | 2.02 | 2.33 | 0.44 | 80 | 4.47 | 5.61 | 4.44 | 4.52 | 4.15 |
| 193a-3p | | | | | | | | | | | | | |
| hsa-miR-22 | 6.51 | 5.44 | 6.27 | 6.30 | 6.85 | 6.27 | 0.52 | 100 | 8.62 | 7.82 | 7.79 | 8.37 | 8.35 |
| hsa-miR-182 | −1.2 | −2.2 | −2.0 | −1.3 | −2.1 | −1.8 | 0.46 | 0 | −0.61 | −0.4 | 1.66 | −0.2 | −0.5 |
| hsa-miR-99b | 1.88 | 1.38 | 1.69 | 2.06 | 1.86 | 1.77 | 0.25 | 20 | 2.15 | 4.42 | 3.47 | 4.08 | 3.98 |
| hsa-miR-24 | 6.51 | 5.91 | 6.50 | 6.48 | 6.56 | 6.39 | 0.27 | 100 | 8.37 | 8.00 | 8.54 | 8.12 | 8.56 |
| hsa-miR- | 3.31 | 2.80 | 3.09 | 3.44 | 3.28 | 3.18 | 0.25 | 100 | 3.50 | 5.49 | 4.45 | 5.04 | 4.85 |
| 125a-5p | | | | | | | | | | | | | |
| hsa-miR-27a | 6.30 | 5.39 | 6.71 | 6.17 | 6.06 | 6.12 | 0.48 | 100 | 8.07 | 8.03 | 7.63 | 7.89 | 7.29 |
| hsa-miR-331- | 5.28 | 5.14 | 4.81 | 5.33 | 5.51 | 5.21 | 0.26 | 100 | 7.20 | 7.45 | 6.81 | 7.22 | 6.68 |
| 3p | | | | | | | | | | | | | |
| hsa-miR-18b | −0.3 | −0.7 | −1.1 | −1.0 | −0.5 | −0.7 | 0.34 | 0 | 0.66 | 0.46 | 3.01 | 1.87 | −0.35 |
| hsa-miR-424 | 1.32 | 0.56 | 0.81 | 1.18 | 0.67 | 0.91 | 0.33 | 0 | 2.03 | 2.84 | 1.40 | 3.64 | 1.44 |
| hsa-let-7e | 6.18 | 5.50 | 5.94 | 6.29 | 6.13 | 6.01 | 0.31 | 100 | 6.53 | 8.27 | 7.29 | 7.95 | 7.78 |
| hsa-miR-24- | −1.2 | 0.36 | −0.7 | −0.7 | −0.8 | −0.6 | 0.59 | 0 | 1.30 | 0.40 | 2.07 | 0.11 | 1.44 |
| 1* | | | | | | | | | | | | | |
| hsa-miR-148b | 0.22 | 0.24 | −0.9 | 0.50 | −0.4 | −0.1 | 0.60 | 0 | 1.44 | 2.28 | 1.00 | 1.83 | 1.18 |
| hsa-miR-34a | 5.63 | 5.46 | 6.04 | 6.00 | 6.61 | 5.95 | 0.44 | 100 | 8.84 | 7.91 | 6.60 | 7.79 | 6.89 |
| hsa-miR-103 | 6.15 | 5.23 | 5.40 | 5.84 | 6.21 | 5.77 | 0.44 | 100 | 7.03 | 8.70 | 7.49 | 7.81 | 7.54 |
| hsa-miR-107 | 5.56 | 4.69 | 4.75 | 5.24 | 5.59 | 5.17 | 0.43 | 100 | 6.32 | 7.79 | 7.54 | 7.06 | 7.03 |
| hsa-miR-27b | 4.35 | 3.63 | 4.77 | 4.28 | 3.98 | 4.20 | 0.43 | 100 | 5.77 | 5.30 | 6.20 | 5.38 | 5.94 |
| hsa-miR- | 2.59 | 1.27 | 2.58 | 3.07 | 2.60 | 2.42 | 0.68 | 100 | 4.36 | 4.79 | 3.44 | 4.04 | 3.98 |
| 193a-5p | | | | | | | | | | | | | |
| hsa-miR-214 | 4.11 | 3.66 | 3.40 | 3.85 | 3.87 | 3.78 | 0.27 | 100 | 4.75 | 5.81 | 4.25 | 5.93 | 4.89 |
| hsa-miR- | 1.68 | 1.58 | 1.28 | 1.86 | 1.28 | 1.54 | 0.26 | 20 | 3.05 | 3.40 | 1.94 | 3.80 | 1.62 |
| 199b-5p | | | | | | | | | | | | | |
| hsa-miR-30d | 4.85 | 4.48 | 4.66 | 4.97 | 5.05 | 4.80 | 0.23 | 100 | 6.61 | 6.57 | 6.47 | 5.58 | 6.06 |
| hsa-miR-629* | 3.08 | 1.10 | 2.05 | 2.33 | 1.35 | 1.98 | 0.79 | 40 | 3.00 | 3.57 | 3.20 | 3.33 | 3.43 |
| hsa-miR-15a | 6.37 | 5.12 | 5.91 | 5.99 | 6.33 | 5.94 | 0.50 | 100 | 7.52 | 7.34 | 7.29 | 7.68 | 5.91 |
| hsa-miR-23b | 4.80 | 4.28 | 5.13 | 4.91 | 4.82 | 4.79 | 0.31 | 100 | 6.20 | 5.62 | 6.37 | 5.77 | 6.30 |
| hsa-miR-25 | 5.60 | 5.08 | 4.54 | 5.26 | 5.51 | 5.20 | 0.42 | 100 | 6.21 | 6.14 | 7.07 | 6.89 | 5.93 |
| hsa-miR- | 6.04 | 5.17 | 5.51 | 5.54 | 5.59 | 5.57 | 0.31 | 100 | 6.83 | 7.04 | 5.67 | 7.93 | 5.99 |
| 199b-3p | | | | | | | | | | | | | |
| hsa-miR-15b | 7.59 | 6.87 | 6.70 | 7.20 | 7.34 | 7.14 | 0.36 | 100 | 7.61 | 8.13 | 9.11 | 8.61 | 7.56 |
| hsa-miR-23a | 6.49 | 6.02 | 6.57 | 6.41 | 6.52 | 6.40 | 0.22 | 100 | 7.64 | 7.49 | 7.13 | 7.35 | 6.86 |
| hsa-miR-1227 | 2.26 | 2.44 | 2.35 | 2.52 | 2.43 | 2.40 | 0.10 | 100 | 1.62 | 2.13 | 1.75 | 1.92 | 2.05 |
| hsa-miR-636 | 2.51 | 2.37 | 2.12 | 2.50 | 2.29 | 2.36 | 0.16 | 80 | 1.53 | 2.27 | 1.95 | 1.93 | 1.93 |
| hsa-miR-145 | 4.87 | 4.36 | 5.10 | 5.04 | 4.91 | 4.86 | 0.29 | 100 | 3.87 | 3.95 | 3.89 | 4.59 | 3.75 |
| hsa-miR-126 | 6.88 | 5.68 | 6.65 | 6.24 | 6.36 | 6.36 | 0.45 | 100 | 5.40 | 5.65 | 5.44 | 6.65 | 5.58 |
| hsa-miR-139 | 2.28 | 2.38 | 3.11 | 1.81 | 2.29 | 2.37 | 0.47 | 100 | 0.53 | 1.61 | 1.53 | 2.46 | 1.62 |
| 3p | | | | | | | | | | | | | |
| hsa-miR-139 | 1.47 | 1.12 | 1.88 | 1.54 | 1.51 | 1.50 | 0.27 | 40 | −2.34 | 0.91 | 0.44 | 0.20 | −0.35 |
| 5p | | | | | | | | | | | | | |
| hsa-miR-150 | 10.0 | 9.57 | 8.48 | 10.0 | 10.1 | 9.66 | 0.70 | 100 | 7.20 | 7.15 | 5.84 | 10.5 | 7.93 |

| Probe ID | LNpos | | | | | | | | LNpos vs LNneg | | |
|---|---|---|---|---|---|---|---|---|---|---|---|
| miRNA | 10 | 11 | 12 | 13 | 14 | Mean | SD | % | test | Log2Diff | FC |
| hsa-miR-200c | 5.94 | 7.21 | 8.19 | 6.10 | 8.82 | 7.66 | 1.08 | 100 | 5.41E−08 | 8.70 | 416 |
| hsa-miR-141 | 5.97 | 7.14 | 7.76 | 5.63 | 8.59 | 7.41 | 1.13 | 100 | 9.79E−09 | 7.96 | 248 |
| hsa-miR-200b | 5.33 | 7.83 | 7.33 | 5.95 | 8.18 | 7.02 | 1.17 | 100 | 1.53E−07 | 7.49 | 179 |
| hsa-miR-183 | 3.99 | 4.68 | 6.37 | 5.74 | 8.31 | 5.72 | 1.46 | 100 | 8.62E−07 | 6.00 | 63.9 |
| hsa-miR-200a | 2.13 | 5.83 | 4.35 | 2.71 | 5.67 | 4.36 | 1.49 | 100 | 2.32E−06 | 5.59 | 48.3 |
| hsa-miR-375 | 4.10 | 6.39 | −0.8 | 2.87 | 6.21 | 3.77 | 2.28 | 90 | 4.63E−04 | 5.27 | 38.7 |
| hsa-miR-429 | 1.49 | 4.36 | 3.19 | 2.41 | 5.22 | 3.74 | 1.36 | 80 | 4.66E−06 | 4.74 | 26.7 |
| hsa-miR-205 | 4.56 | 4.06 | 6.53 | 4.47 | 6.35 | 4.24 | 2.31 | 80 | 1.36E−03 | 4.42 | 21.4 |
| hsa-miR-96 | 4.12 | 4.08 | 5.45 | 4.62 | 7.23 | 4.72 | 1.35 | 100 | 1.26E−05 | 4.35 | 20.4 |
| hsa-miR-196a | 4.78 | 7.04 | 5.41 | 4.27 | 9.43 | 5.74 | 2.18 | 90 | 1.90E−03 | 4.04 | 16.4 |
| hsa-miR-21 | 11.2 | 10.5 | 11.8 | 11.2 | 12.4 | 11.5 | 0.60 | 100 | 6.49E−08 | 3.39 | 10.5 |
| hsa-miR- | 0.51 | 3.77 | 1.65 | 0.47 | 2.74 | 2.16 | 1.25 | 80 | 1.04E−04 | 3.37 | 10.3 |
| 200a* | | | | | | | | | | | |
| hsa-miR-21* | 4.33 | 2.40 | 3.73 | 3.48 | 4.76 | 3.92 | 0.75 | 100 | 6.85E−06 | 3.30 | 9.8 |
| hsa-miR-210 | 5.60 | 2.75 | 6.48 | 6.31 | 6.28 | 5.65 | 1.32 | 100 | 1.29E−04 | 3.29 | 9.8 |
| hsa-miR- | −0.3 | 2.93 | 1.51 | 0.18 | 1.87 | 1.40 | 1.15 | 80 | 1.22E−04 | 2.99 | 7.9 |
| 200b* | | | | | | | | | | | |
| hsa-miR-503 | 0.87 | −0.4 | 1.31 | 2.03 | 4.10 | 1.62 | 1.28 | 80 | 2.71E−04 | 2.91 | 7.5 |
| hsa-miR-301a | 1.00 | 0.75 | 2.64 | 1.22 | 2.95 | 2.85 | 1.49 | 70 | 1.16E−03 | 2.83 | 7.1 |
| hsa-miR-425 | 5.27 | 4.34 | 6.12 | 3.62 | 6.04 | 5.16 | 0.81 | 100 | 3.44E−05 | 2.34 | 5.1 |
| hsa-miR-193b | 3.34 | 5.13 | 5.10 | 4.47 | 5.37 | 5.39 | 1.03 | 100 | 5.40E−04 | 2.17 | 4.5 |
| hsa-miR-130b | 5.81 | 2.58 | 4.43 | 3.97 | 5.31 | 4.81 | 1.05 | 100 | 1.05E−03 | 2.13 | 4.4 |
| hsa-miR-151 | 2.34 | 2.79 | 3.83 | 2.43 | 5.01 | 3.87 | 1.06 | 100 | 9.61E−04 | 2.09 | 4.3 |
| 3p | | | | | | | | | | | |
| hsa-miR-203 | 0.76 | 1.87 | −0.1 | 0.76 | 1.23 | 1.08 | 0.93 | 20 | 7.55E−04 | 1.93 | 3.8 |
| hsa-miR-93 | 3.75 | 3.45 | 5.14 | 4.78 | 4.97 | 4.92 | 0.84 | 100 | 4.92E−04 | 1.92 | 3.8 |
| hsa-miR-454 | −0.3 | 0.23 | 1.30 | 0.22 | 1.90 | 1.46 | 1.14 | 50 | 5.28E−03 | 1.89 | 3.7 |
| hsa-miR-106b | 6.09 | 5.81 | 6.75 | 6.33 | 6.91 | 6.89 | 0.71 | 100 | 2.27E−04 | 1.84 | 3.6 |
| hsa-miR-324- | 2.68 | 3.32 | 4.18 | 3.29 | 4.87 | 4.31 | 0.98 | 100 | 2.79E−03 | 1.79 | 3.5 |
| 5p | | | | | | | | | | | |
| hsa-miR- | 3.69 | 3.15 | 3.82 | 3.08 | 4.33 | 4.13 | 0.74 | 100 | 2.75E−04 | 1.79 | 3.5 |
| 193a-3p | | | | | | | | | | | |
| hsa-miR-22 | 7.78 | 7.87 | 7.55 | 7.82 | 8.22 | 8.02 | 0.34 | 100 | 2.82E−06 | 1.75 | 3.4 |
| hsa-miR-182 | −1.3 | −1.1 | 0.95 | −1.2 | 1.84 | −0.1 | 1.17 | 30 | 8.85E−03 | 1.70 | 3.2 |
| hsa-miR-99b | 2.87 | 2.60 | 3.82 | 2.43 | 4.24 | 3.41 | 0.83 | 90 | 9.61E−04 | 1.63 | 3.1 |
| hsa-miR-24 | 7.17 | 7.50 | 7.78 | 7.74 | 8.33 | 8.01 | 0.46 | 100 | 7.30E−06 | 1.62 | 3.1 |
| hsa-miR- | 4.76 | 4.27 | 6.04 | 4.18 | 5.23 | 4.78 | 0.72 | 100 | 4.08E−04 | 1.60 | 3.0 |
| 125a-5p | | | | | | | | | | | |
| hsa-miR-27a | 7.09 | 7.70 | 7.95 | 7.59 | 7.92 | 7.72 | 0.32 | 100 | 3.44E−06 | 1.59 | 3.0 |
| hsa-miR-331- | 5.80 | 5.96 | 7.04 | 5.80 | 7.98 | 6.79 | 0.74 | 100 | 5.20E−04 | 1.58 | 3.0 |
| 3p | | | | | | | | | | | |
| hsa-miR-18b | 1.01 | −0.66 | 0.39 | 0.58 | 1.18 | 0.82 | 1.06 | 40 | 6.81E−03 | 1.58 | 3.0 |
| hsa-miR-424 | 1.66 | 1.59 | 2.65 | 2.78 | 4.14 | 2.42 | 0.96 | 50 | 4.90E−03 | 1.51 | 2.8 |
| hsa-let-7e | 6.62 | 7.24 | 8.52 | 6.85 | 7.98 | 7.50 | 0.70 | 100 | 5.76E−04 | 1.50 | 2.8 |
| hsa-miR-24- | 0.58 | 0.43 | 0.26 | 0.59 | 1.48 | 0.87 | 0.66 | 20 | 8.65E−04 | 1.50 | 2.8 |
| 1* | | | | | | | | | | | |
| hsa-miR-148b | −0.2 | 1.36 | 1.89 | 0.79 | 2.46 | 1.40 | 0.79 | 40 | 2.69E−03 | 1.49 | 2.8 |
| hsa-miR-34a | 7.10 | 6.87 | 7.24 | 7.33 | 7.39 | 7.40 | 0.65 | 100 | 6.35E−04 | 1.45 | 2.7 |
| hsa-miR-103 | 5.53 | 6.51 | 7.93 | 6.01 | 7.39 | 7.19 | 0.95 | 100 | 7.64E−03 | 1.43 | 2.7 |
| hsa-miR-107 | 5.03 | 5.69 | 7.36 | 5.46 | 6.63 | 6.59 | 0.94 | 100 | 7.26E−03 | 1.42 | 2.7 |
| hsa-miR-27b | 4.94 | 5.23 | 5.10 | 5.63 | 5.98 | 5.54 | 0.42 | 100 | 6.26E−05 | 1.34 | 2.5 |
| hsa-miR- | 3.42 | 3.47 | 3.67 | 2.86 | 3.46 | 3.75 | 0.55 | 100 | 1.32E−03 | 1.33 | 2.5 |
| 193a-5p | | | | | | | | | | | |
| hsa-miR-214 | 4.07 | 5.80 | 5.25 | 4.55 | 5.63 | 5.09 | 0.69 | 100 | 1.33E−03 | 1.31 | 2.5 |
| hsa-miR- | 2.38 | 3.08 | 2.70 | 2.51 | 2.89 | 2.74 | 0.66 | 100 | 1.89E−03 | 1.20 | 2.3 |
| 199b-5p | | | | | | | | | | | |
| hsa-miR-30d | 5.06 | 5.34 | 6.64 | 4.80 | 6.44 | 5.96 | 0.70 | 100 | 3.78E−03 | 1.15 | 2.2 |
| hsa-miR-629* | 3.00 | 2.21 | 3.34 | 2.39 | 3.38 | 3.08 | 0.45 | 100 | 4.05E−03 | 1.10 | 2.1 |
| hsa-miR-15a | 6.30 | 7.19 | 7.28 | 6.36 | 7.14 | 7.00 | 0.59 | 100 | 4.70E−03 | 1.06 | 2.1 |
| hsa-miR-23b | 5.20 | 5.72 | 5.29 | 5.80 | 5.95 | 5.82 | 0.40 | 100 | 2.18E−04 | 1.03 | 2.0 |
| hsa-miR-25 | 5.73 | 4.94 | 6.11 | 6.31 | 6.90 | 6.22 | 0.63 | 100 | 6.47E−03 | 1.02 | 2.0 |
| hsa-miR- | 5.81 | 7.12 | 6.37 | 6.30 | 6.75 | 6.58 | 0.69 | 100 | 8.96E−03 | 1.01 | 2.0 |
| 199b-3p | | | | | | | | | | | |
| hsa-miR-15b | 8.03 | 7.95 | 7.83 | 7.34 | 7.94 | 8.01 | 0.52 | 100 | 5.28E−03 | 0.87 | 1.8 |
| hsa-miR-23a | 6.36 | 7.17 | 7.67 | 6.96 | 7.21 | 7.18 | 0.40 | 100 | 1.34E−03 | 0.78 | 1.7 |
| hsa-miR-1227 | 2.42 | 1.49 | 2.12 | 2.13 | 2.23 | 1.99 | 0.29 | 70 | 9.67E−03 | −0.4 | 1.3 |
| hsa-miR-636 | 2.14 | 1.33 | 2.01 | 1.37 | 2.03 | 1.85 | 0.32 | 70 | 6.00E−03 | −0.5 | 1.4 |
| hsa-miR-145 | 4.03 | 4.02 | 4.67 | 4.06 | 3.68 | 4.05 | 0.33 | 100 | 4.69E−04 | −0.8 | 1.7 |
| hsa-miR-126 | 5.23 | 5.19 | 5.40 | 5.11 | 5.86 | 5.55 | 0.45 | 100 | 5.63E−03 | −0.8 | 1.8 |
| hsa-miR-139 | 1.34 | 0.92 | 0.09 | 1.23 | 1.06 | 1.24 | 0.65 | 40 | 4.38E−03 | −1.1 | 2.2 |
| 3p | | | | | | | | | | | |
| hsa-miR-139 | 0.01 | 0.81 | 0.59 | −0.88 | 0.65 | 0.01 | 0.99 | 0 | 6.22E−03 | −1.5 | 2.8 |
| 5p | | | | | | | | | | | |
| hsa-miR-150 | 7.42 | 6.79 | 6.45 | 5.75 | 7.89 | 7.30 | 1.38 | 100 | 3.51E−03 | −2.3 | 5.1 |

SD, standard deviation;
%, percentage of samples expressing miRNA above background levels;
Log2Diff, difference in VSN-transformed expression between LNpos and LNneg samples;
FC, fold change.

### Example 45 qRT-PCR Verification of Differentially Expressed Micro-RNAs in Two Group of Cancer-positive and Cancer-negative Lymph Nodes from Breast Cancer Patients

[0374] The inventors evaluated the differential expression of ten selected miRNAs (miR-429, -200a, -375, -200b, -203, -141, -200c, -183, -196a, and -205) in LNpos and LNneg samples from breast cancer patients (Table 38, Example 40 and Table 42, Example 44), by qRT-PCR. qRT-PCR reactions were performed using Taqman® MicroRNA Assays (Applied Biosystems; Foster City, Calif., USA) specific for the ten microRNAs. Assays were performed according to the manufacturer's instructions with 15 ng of input total RNA from the samples (LNpos2-4, LNpos5-14 and LNneg1-9). Reactions were incubated in a 7900HT Real-Time PCR system (Applied Biosystems, Foster City, Calif., USA). Initial data analysis was done using the 7500 Fast System SDS V2.3 software (Applied Biosystems). With this combined set of samples, miR-638 expression level was found to be more variable across the samples than in qRT-PCR reactions performed with only samples from Table 38 (Example 43). Here, the miR-16 expression level was constant among the different samples. As a consequence, the inventors chose to use the mean of the sum of the Ct values for both miR-16 and miR-638 (1/2(Ct miR-16+Ct miR-638)) for normalization (dCt=Ct miRNA -1/2(Ct miR-16+Ct miR-638). Average expression levels of each miRNA in LNneg and LNpos of the two independent sets of samples are illustrated after normalization to miR-16 and miR-638 (FIG. 14A, FIG. 14B). qRT-PCR quantification, using miR-16 and miR-638 as normalizers, confirmed the differential expression of the ten miRNAs in the LNneg1-4 and LNpos2-4 samples, (FIG. 14A), as well as in LNpos 5-14 and LNneg 5-9 (FIG. 14B), validating their differential expression in LNneg and LNpos from breast cancer patients. Combined qRT-PCR data for the two sets of samples (LNpos2-14 and LNneg1-9) (FIG. 15) showed that seven miRNAs in particular, miR-429, -200a, -200b, -203, -141, -200c, and -375, represent useful markers for the identification of breast cancer cells in axillary lymph nodes of breast cancer patients.

### Example 46

### Identification of Classifiers for Cancer-positive Lymph Nodes in Patients with Ductal Breast Cancer

[0375] The inventors have demonstrated that miRNA quantification and expression analysis can differentiate cancer-positive from cancer-negative axillary lymph nodes from breast cancer patients. To further demonstrate the utility of specific miRNA markers as diagnostic analytes, the inventors quantified specific combinations of miRNAs by qRT-PCR to determine if any such combinations enhanced the distinction between cancer-positive and cancer-negative lymph nodes from breast cancer patients. qRT-PCR assays were performed as described above in Example 45. For the miRNA combinations miR-429+miR-200a, miR-429+miR-141, miR-200b+miR-203, the normalized Ct values to both miR-16 and miR-638 were added. For the combinations, miR-429-miR-150 and miR-200a-miR-150, the raw Ct values of each miRNA were subtracted. The inventors determined that quantification of several miRNA combinations such as miR-429+miR-200a, miR-429+miR-141, miR-200b+miR-203, miR-429-miR-150, and miR200a-miR-150, enhances the distinction between cancer-positive and cancer-negative lymph nodes from breast cancer patients (FIG. 16).

### Example 47

### Additional Microarray Analysis of MicroRNA Differentially Expressed Between Cancer-positive and Cancer-negative Inguinal Lymph Nodes from Cervical Cancer Patients

[0376] Further microRNA microarray expression analysis was performed on the LNpos and LNneg inguinal lymph nodes from cervical cancer patients that have been described above in Example 1, Table 3. Here, the microRNA array used for expression analysis was the Agilent Human miRNA Microarray (V2) (Agilent Technologies, Inc.; Santa Clara, Calif., USA), described above in Example 44. Microarray expression analysis was as described above in Example 44.

[0377] A total of 324 human miRNAs were expressed above background level in the LNpos samples, representing 45% of the miRNAs present on the arrays. A total of 260 miRNAs were expressed above background level in the LNneg samples, representing 36% of the miRNAs present on the arrays.

[0378] A total of 107 human miRNAs were significantly differentially expressed between LNpos and LNneg (Table 44). Among these, 57 were up-regulated (Log2 diff (LNpos vs LNneg)≧1) and 40 were down-regulated (Log2 diff (LNpos vs LNneg)≦1) by more than 2-fold in LNpos as compared with LNneg samples. Twenty-two miRNAs were expressed at levels at least 5-fold higher (Log2 diff (LNpos vs LNneg)<2.3) in the LNpos samples, with a Student t-test p-value<0.01. Of those, 10 miRNAs (hsa-miR-205, -200b, -203, -200a, -429, -200c, -141, -224, -135b, and -200b*) were expressed at levels at least 10-fold higher in the LNpos samples (Log2 diff (LNpos vs LNneg)≧3.3). Among the miRNAs expressed at lower levels in the LNpos samples, only one (hsa-miRNA-342-5p) was under-expressed by at least 5-fold compared to the LNneg samples, with a Student t-test p-value≦0.01.

TABLE 44
miRNAs differentially expressed between four cancer-positive (LNpos) lymph nodes and four cancer-negative (LNneg)
lymph nodes from cervical cancer patients following microarray expression analysis.

| Probe ID | LNneg | | | | | | | LNpos | | | | | | | LNpos vs LNneg | | |
|---|---|---|---|---|---|---|---|---|---|---|---|---|---|---|---|---|---|
| miRNA | 1 | 2 | 3 | 4 | Mean | SD | % | 1 | 2 | 3 | 4 | Mean | SD | % | ttest | Log 2 Diff | FC |
| hsa-let-7c | 12.90 | 12.39 | 12.52 | 12.63 | 12.61 | 0.22 | 100 | 13.38 | 13.72 | 12.95 | 13.52 | 13.39 | 0.33 | 100 | 7.13E−03 | 0.78 | 2 |
| hsa-let-7g | 14.18 | 14.35 | 13.65 | 13.90 | 14.02 | 0.31 | 100 | 12.86 | 11.97 | 12.19 | 13.47 | 12.62 | 0.68 | 100 | 9.60E−03 | −1.40 | 3 |
| hsa-let-7i | 13.37 | 13.38 | 12.90 | 13.08 | 13.18 | 0.23 | 100 | 12.41 | 12.21 | 12.62 | 12.73 | 12.49 | 0.23 | 100 | 5.70E−03 | −0.69 | 2 |
| hsa-miR-1225-3p | 4.91 | 4.83 | 5.39 | 5.04 | 5.04 | 0.25 | 100 | 4.23 | 4.40 | 4.45 | 4.40 | 4.37 | 0.10 | 100 | 2.38E−03 | −0.67 | 2 |
| hsa-miR-1238 | 4.90 | 4.89 | 5.01 | 4.81 | 4.90 | 0.08 | 75 | 4.12 | 4.01 | 4.44 | 4.23 | 4.20 | 0.18 | 50 | 4.05E−04 | −0.70 | 2 |
| hsa-miR-124 | 4.43 | 4.96 | 6.19 | 4.26 | 4.96 | 0.87 | 100 | 3.67 | 3.34 | 3.30 | 3.33 | 3.41 | 0.17 | 25 | 1.30E−02 | −1.55 | 3 |
| hsa-miR-126 | 13.11 | 12.37 | 11.98 | 12.57 | 12.51 | 0.47 | 100 | 11.03 | 10.87 | 10.58 | 11.60 | 11.02 | 0.43 | 100 | 3.52E−03 | −1.49 | 3 |
| hsa-miR-127-3p | 3.83 | 4.72 | 4.14 | 4.43 | 4.28 | 0.38 | 25 | 6.20 | 6.85 | 7.19 | 5.16 | 6.35 | 0.89 | 100 | 5.26E−03 | 2.07 | 4 |
| hsa-miR-129-3p | 5.67 | 4.93 | 4.93 | 4.58 | 5.03 | 0.46 | 100 | 3.09 | 2.87 | 3.21 | 3.77 | 3.23 | 0.38 | 0 | 9.48E−04 | −1.79 | 3 |
| hsa-miR-135b | 2.52 | 3.25 | 2.57 | 3.24 | 2.90 | 0.40 | 0 | 7.99 | 5.27 | 6.85 | 6.37 | 6.62 | 1.13 | 100 | 7.94E−04 | 3.73 | 13 |
| hsa-miR-138-2* | 5.40 | 5.15 | 5.37 | 5.19 | 5.28 | 0.13 | 100 | 6.25 | 6.09 | 5.93 | 6.11 | 6.09 | 0.13 | 100 | 1.10E−04 | 0.82 | 2 |
| hsa-miR-139-3p | 6.64 | 6.94 | 6.71 | 6.26 | 6.64 | 0.28 | 100 | 5.96 | 6.01 | 5.71 | 6.11 | 5.95 | 0.17 | 100 | 5.73E−03 | −0.69 | 2 |
| hsa-miR-139-5p | 7.65 | 6.84 | 7.16 | 7.41 | 7.26 | 0.35 | 100 | 5.98 | 5.95 | 4.90 | 5.72 | 5.63 | 0.50 | 100 | 1.80E−03 | −1.63 | 3 |
| hsa-miR-140-3p | 11.04 | 11.11 | 10.60 | 10.93 | 10.92 | 0.23 | 100 | 9.42 | 8.82 | 8.69 | 10.05 | 9.25 | 0.62 | 100 | 2.30E−03 | −1.68 | 3 |
| hsa-miR-140-5p | 8.51 | 8.50 | 7.79 | 8.39 | 8.30 | 0.35 | 100 | 7.05 | 6.63 | 6.85 | 7.67 | 7.05 | 0.45 | 100 | 4.53E−03 | −1.25 | 2 |
| hsa-miR-141 | 4.62 | 4.46 | 3.29 | 4.40 | 4.19 | 0.61 | 50 | 10.08 | 10.75 | 11.55 | 10.02 | 10.60 | 0.71 | 100 | 9.59E−06 | 6.41 | 85 |
| hsa-miR-141* | 1.43 | 0.99 | 0.60 | 1.51 | 1.13 | 0.42 | 0 | 3.53 | 3.71 | 3.89 | 2.90 | 3.51 | 0.43 | 50 | 2.19E−04 | 2.38 | 5 |
| hsa-miR-149 | 4.20 | 4.08 | 4.58 | 4.19 | 4.26 | 0.22 | 25 | 6.99 | 7.84 | 5.03 | 6.52 | 6.59 | 1.18 | 100 | 7.96E−03 | 2.33 | 5 |
| hsa-miR-16-2* | 4.63 | 4.94 | 4.69 | 4.58 | 4.71 | 0.16 | 100 | 5.63 | 5.75 | 5.95 | 5.89 | 5.81 | 0.14 | 100 | 5.29E−05 | 1.10 | 2 |
| hsa-miR-181a | 10.58 | 10.66 | 10.29 | 10.92 | 10.61 | 0.26 | 100 | 9.25 | 9.36 | 9.58 | 9.94 | 9.53 | 0.30 | 100 | 1.65E−03 | −1.08 | 2 |
| hsa-miR-181b | 8.48 | 8.54 | 8.46 | 8.95 | 8.61 | 0.23 | 100 | 7.77 | 7.68 | 7.85 | 8.29 | 7.90 | 0.27 | 100 | 7.17E−03 | −0.71 | 2 |
| hsa-miR-182 | 1.89 | 2.57 | 1.72 | 2.86 | 2.26 | 0.55 | 0 | 5.44 | 4.79 | 5.06 | 4.25 | 4.88 | 0.50 | 100 | 3.98E−04 | 2.62 | 6 |
| hsa-miR-183 | 2.82 | 4.01 | 2.34 | 3.65 | 3.20 | 0.76 | 25 | 6.74 | 6.07 | 7.03 | 5.82 | 6.42 | 0.56 | 100 | 5.02E−04 | 3.21 | 9 |
| hsa-miR-183* | 2.71 | 1.84 | 2.55 | 1.65 | 2.19 | 0.52 | 0 | 3.28 | 3.29 | 3.78 | 3.07 | 3.35 | 0.30 | 25 | 8.29E−03 | 1.17 | 2 |
| hsa-miR-191* | 4.70 | 4.68 | 4.67 | 4.41 | 4.62 | 0.14 | 25 | 4.03 | 3.95 | 4.38 | 4.06 | 4.11 | 0.19 | 25 | 4.71E−03 | −0.51 | 1 |
| hsa-miR-192 | 7.48 | 7.61 | 6.65 | 7.12 | 7.22 | 0.43 | 100 | 6.01 | 5.16 | 4.66 | 6.23 | 5.51 | 0.73 | 100 | 6.99E−03 | −1.70 | 3 |
| hsa-miR-194 | 6.74 | 6.71 | 5.91 | 6.56 | 6.48 | 0.39 | 100 | 5.84 | 5.04 | 4.66 | 5.60 | 5.29 | 0.54 | 100 | 1.14E−02 | −1.19 | 2 |
| hsa-miR-195 | 11.90 | 11.51 | 10.80 | 11.60 | 11.45 | 0.47 | 100 | 10.33 | 10.11 | 10.45 | 10.68 | 10.39 | 0.24 | 100 | 6.68E−03 | −1.06 | 2 |
| hsa-miR-197 | 7.52 | 7.29 | 7.90 | 7.91 | 7.65 | 0.30 | 100 | 6.66 | 5.99 | 6.23 | 6.69 | 6.39 | 0.34 | 100 | 1.48E−03 | −1.26 | 2 |
| hsa-miR-198 | 4.46 | 5.06 | 5.86 | 4.71 | 5.02 | 0.61 | 75 | 6.39 | 6.59 | 6.84 | 5.91 | 6.43 | 0.39 | 100 | 8.15E−03 | 1.41 | 3 |
| hsa-miR-199b-5p | 6.91 | 6.49 | 6.85 | 7.01 | 6.81 | 0.23 | 100 | 8.42 | 8.42 | 9.11 | 7.90 | 8.46 | 0.49 | 100 | 9.14E−04 | 1.65 | 3 |
| hsa-miR-200a | 3.75 | 3.42 | 3.02 | 3.82 | 3.50 | 0.37 | 0 | 11.92 | 11.26 | 12.71 | 11.00 | 11.72 | 0.76 | 100 | 1.21E−06 | 8.22 | 298 |
| hsa-miR-200a* | 2.74 | 2.99 | 3.64 | 3.19 | 3.14 | 0.38 | 0 | 6.48 | 6.60 | 6.59 | 5.28 | 6.24 | 0.64 | 100 | 1.62E−04 | 3.10 | 9 |
| hsa-miR-200b | 4.54 | 4.11 | 2.95 | 3.52 | 3.78 | 0.69 | 25 | 12.82 | 11.90 | 12.83 | 11.42 | 12.24 | 0.70 | 100 | 2.48E−06 | 8.46 | 352 |
| hsa-miR-200b* | 3.66 | 3.24 | 3.90 | 3.64 | 3.61 | 0.27 | 0 | 7.54 | 6.96 | 7.17 | 6.23 | 6.98 | 0.55 | 100 | 3.50E−05 | 3.37 | 10 |
| hsa-miR-200c | 4.77 | 4.48 | 4.70 | 4.38 | 4.58 | 0.18 | 100 | 10.77 | 11.27 | 11.80 | 10.28 | 11.03 | 0.65 | 100 | 1.35E−06 | 6.45 | 87 |
| hsa-miR-203 | 2.73 | 1.80 | 2.30 | 1.63 | 2.11 | 0.50 | 0 | 7.51 | 10.76 | 12.53 | 10.99 | 10.45 | 2.11 | 100 | 2.53E−04 | 8.34 | 323 |
| hsa-miR-205 | 1.99 | 2.22 | 1.24 | 1.65 | 1.77 | 0.43 | 0 | 13.15 | 15.02 | 15.15 | 13.55 | 14.22 | 1.02 | 100 | 4.94E−07 | 12.44 | 5573 |
| hsa-miR-21 | 12.70 | 13.26 | 12.33 | 13.05 | 12.83 | 0.41 | 100 | 14.27 | 13.93 | 15.08 | 14.24 | 14.38 | 0.49 | 100 | 2.82E−03 | 1.55 | 3 |
| hsa-miR-21* | 5.45 | 6.05 | 5.81 | 5.66 | 5.74 | 0.25 | 100 | 7.26 | 7.15 | 7.94 | 7.50 | 7.46 | 0.35 | 100 | 2.08E−04 | 1.72 | 3 |
| hsa-miR-210 | 6.42 | 6.70 | 6.15 | 6.72 | 6.50 | 0.27 | 100 | 9.25 | 9.77 | 9.71 | 9.49 | 9.55 | 0.24 | 100 | 2.50E−06 | 3.05 | 8 |
| hsa-miR-215 | 6.59 | 6.64 | 5.86 | 6.29 | 6.35 | 0.36 | 100 | 5.60 | 4.87 | 4.58 | 5.57 | 5.16 | 0.51 | 100 | 8.84E−03 | −1.19 | 2 |
| hsa-miR-22* | 4.62 | 3.93 | 3.47 | 4.18 | 4.05 | 0.48 | 25 | 5.98 | 5.63 | 5.59 | 5.41 | 5.65 | 0.24 | 100 | 9.65E−04 | 1.60 | 3 |
| hsa-miR-221 | 8.26 | 7.90 | 7.77 | 7.77 | 7.93 | 0.23 | 100 | 9.00 | 9.30 | 9.99 | 9.23 | 9.38 | 0.43 | 100 | 9.53E−04 | 1.45 | 3 |
| hsa-miR-224 | 6.33 | 5.82 | 5.41 | 5.34 | 5.73 | 0.45 | 100 | 10.16 | 9.51 | 10.33 | 10.03 | 10.01 | 0.35 | 100 | 5.68E−06 | 4.28 | 19 |
| hsa-miR-23a | 12.92 | 12.68 | 12.48 | 12.90 | 12.74 | 0.21 | 100 | 13.45 | 13.19 | 13.80 | 13.45 | 13.47 | 0.25 | 100 | 4.19E−03 | 0.73 | 2 |
| hsa-miR-23b | 10.66 | 10.25 | 10.32 | 10.54 | 10.44 | 0.19 | 100 | 12.15 | 12.96 | 12.92 | 13.09 | 12.78 | 0.43 | 100 | 5.89E−05 | 2.34 | 5 |
| hsa-miR-23b* | 2.58 | 2.38 | 3.18 | 3.84 | 3.00 | 0.66 | 0 | 4.11 | 5.37 | 4.42 | 5.07 | 4.74 | 0.58 | 100 | 7.26E−03 | 1.75 | 3 |
| hsa-miR-24 | 12.13 | 11.91 | 11.57 | 11.95 | 11.89 | 0.23 | 100 | 12.55 | 12.79 | 13.11 | 13.03 | 12.87 | 0.25 | 100 | 1.26E−03 | 0.98 | 2 |
| hsa-miR-24-1* | 2.71 | 2.74 | 2.34 | 3.34 | 2.78 | 0.41 | 0 | 3.93 | 4.60 | 4.71 | 4.62 | 4.46 | 0.36 | 100 | 8.74E−04 | 1.68 | 3 |
| hsa-miR-26a | 13.16 | 13.09 | 12.57 | 13.04 | 12.97 | 0.27 | 100 | 12.09 | 11.55 | 12.00 | 12.26 | 11.98 | 0.30 | 100 | 2.71E−03 | −0.99 | 2 |
| hsa-miR-26b | 13.07 | 12.84 | 12.36 | 12.87 | 12.79 | 0.30 | 100 | 11.79 | 11.30 | 11.24 | 12.43 | 11.69 | 0.55 | 100 | 1.32E−02 | −1.10 | 2 |
| hsa-miR-27b | 9.95 | 9.57 | 9.35 | 9.60 | 9.62 | 0.25 | 100 | 11.25 | 12.07 | 12.17 | 12.18 | 11.92 | 0.45 | 100 | 1.04E−04 | 2.30 | 5 |
| hsa-miR-29a | 14.46 | 14.57 | 13.72 | 13.94 | 14.17 | 0.41 | 100 | 12.46 | 11.35 | 12.08 | 13.15 | 12.26 | 0.75 | 100 | 4.17E−03 | −1.92 | 4 |
| hsa-miR-29c | 13.74 | 13.47 | 12.52 | 12.82 | 13.14 | 0.56 | 100 | 11.62 | 10.51 | 10.70 | 12.30 | 11.28 | 0.83 | 100 | 1.02E−02 | −1.85 | 4 |
| hsa-miR-30a | 9.82 | 9.64 | 8.98 | 9.68 | 9.53 | 0.37 | 100 | 8.66 | 8.20 | 8.27 | 9.08 | 8.55 | 0.40 | 100 | 1.18E−02 | −0.98 | 2 |
| hsa-miR-30b | 11.41 | 11.25 | 10.54 | 11.01 | 11.05 | 0.38 | 100 | 10.16 | 9.96 | 10.24 | 10.55 | 10.23 | 0.25 | 100 | 1.05E−02 | −0.83 | 2 |
| hsa-miR-30c-1* | 4.04 | 4.11 | 4.09 | 4.09 | 4.08 | 0.03 | 100 | 4.27 | 4.47 | 4.46 | 4.25 | 4.36 | 0.12 | 100 | 3.83E−03 | 0.28 | 1 |
| hsa-miR-31* | 2.22 | 4.08 | 3.58 | 2.66 | 3.14 | 0.85 | 0 | 6.20 | 4.99 | 5.21 | 6.21 | 5.65 | 0.64 | 100 | 3.24E−03 | 2.52 | 6 |
| hsa-miR-324-3p | 11.04 | 10.89 | 10.94 | 10.79 | 10.92 | 0.11 | 100 | 10.34 | 10.27 | 10.35 | 10.76 | 10.43 | 0.23 | 100 | 7.97E−03 | −0.49 | 1 |
| hsa-miR-326 | 5.24 | 4.96 | 4.63 | 4.87 | 4.93 | 0.25 | 100 | 4.04 | 3.56 | 3.43 | 4.44 | 3.87 | 0.46 | 75 | 6.92E−03 | −1.06 | 2 |
| hsa-miR-328 | 5.34 | 5.46 | 5.64 | 5.78 | 5.56 | 0.20 | 100 | 4.27 | 3.62 | 3.70 | 4.25 | 3.96 | 0.35 | 50 | 2.02E−04 | −1.60 | 3 |
| hsa-miR-338-3p | 6.34 | 6.40 | 5.96 | 6.64 | 6.34 | 0.28 | 100 | 5.39 | 5.22 | 4.96 | 5.73 | 5.32 | 0.32 | 100 | 3.19E−03 | −1.02 | 2 |
| hsa-miR-338-5p | 5.05 | 4.95 | 5.35 | 5.28 | 5.16 | 0.19 | 100 | 4.45 | 4.75 | 4.61 | 4.60 | 4.60 | 0.12 | 100 | 2.49E−03 | −0.56 | 1 |
| hsa-miR-342-3p | 12.34 | 12.76 | 12.12 | 12.52 | 12.43 | 0.27 | 100 | 10.58 | 9.96 | 10.31 | 11.31 | 10.54 | 0.57 | 100 | 9.74E−04 | −1.90 | 4 |
| hsa-miR-342-5p | 9.27 | 9.65 | 9.40 | 9.53 | 9.46 | 0.16 | 100 | 7.54 | 6.55 | 6.41 | 8.47 | 7.24 | 0.96 | 100 | 3.84E−03 | −2.22 | 5 |
| hsa-miR-34a* | 5.04 | 4.86 | 4.28 | 4.50 | 4.67 | 0.34 | 75 | 5.73 | 5.46 | 5.40 | 5.59 | 5.54 | 0.15 | 100 | 3.49E−03 | 0.87 | 2 |
| hsa-miR-370 | 3.95 | 4.35 | 4.73 | 4.28 | 4.33 | 0.32 | 0 | 5.59 | 6.24 | 5.80 | 4.94 | 5.64 | 0.54 | 100 | 5.90E−03 | 1.31 | 2 |
| hsa-miR-376a | 3.73 | 4.36 | 3.09 | 3.74 | 3.73 | 0.52 | 0 | 5.53 | 6.06 | 6.83 | 4.77 | 5.80 | 0.87 | 100 | 6.44E−03 | 2.07 | 4 |
| hsa-miR-376c | 3.49 | 4.53 | 3.81 | 4.15 | 4.00 | 0.45 | 0 | 5.38 | 5.85 | 6.96 | 4.98 | 5.79 | 0.86 | 100 | 9.82E−03 | 1.80 | 3 |
| hsa-miR-377 | 2.51 | 2.47 | 2.18 | 3.15 | 2.58 | 0.41 | 0 | 4.64 | 5.14 | 5.93 | 4.16 | 4.97 | 0.76 | 75 | 1.43E−03 | 2.39 | 5 |
| hsa-miR-378 | 7.01 | 6.50 | 6.61 | 6.71 | 6.71 | 0.22 | 100 | 8.64 | 8.58 | 8.85 | 8.09 | 8.54 | 0.32 | 100 | 7.92E−05 | 1.84 | 4 |
| hsa-miR-378* | 4.87 | 4.08 | 4.19 | 4.32 | 4.37 | 0.35 | 25 | 5.87 | 5.58 | 5.89 | 5.15 | 5.62 | 0.34 | 100 | 2.19E−03 | 1.26 | 2 |
| hsa-miR-381 | 3.02 | 3.05 | 3.41 | 2.85 | 3.08 | 0.23 | 0 | 4.23 | 4.16 | 4.74 | 3.52 | 4.16 | 0.50 | 25 | 8.16E−03 | 1.08 | 2 |
| hsa-miR-409-3p | 2.70 | 3.78 | 3.07 | 3.01 | 3.14 | 0.46 | 0 | 5.28 | 5.38 | 5.73 | 3.97 | 5.09 | 0.77 | 75 | 4.76E−03 | 1.95 | 4 |
| hsa-miR-423-3p | 5.12 | 5.03 | 5.03 | 4.91 | 5.02 | 0.09 | 100 | 5.45 | 5.43 | 5.24 | 5.22 | 5.34 | 0.12 | 100 | 6.07E−03 | 0.31 | 1 |
| hsa-miR-425* | 4.61 | 4.73 | 4.76 | 4.66 | 4.69 | 0.06 | 25 | 3.91 | 4.27 | 3.85 | 4.14 | 4.04 | 0.20 | 0 | 7.96E−04 | −0.65 | 2 |
| hsa-miR-429 | 2.43 | 1.51 | 2.13 | 1.20 | 1.82 | 0.56 | 0 | 10.25 | 9.04 | 10.81 | 8.88 | 9.74 | 0.94 | 100 | 6.72E−06 | 7.93 | 244 |
| hsa-miR-432 | 3.27 | 3.28 | 3.89 | 3.51 | 3.49 | 0.29 | 0 | 4.24 | 4.77 | 4.75 | 3.87 | 4.41 | 0.43 | 50 | 1.27E−02 | 0.92 | 2 |
| hsa-miR-452 | 4.51 | 4.61 | 4.11 | 4.17 | 4.35 | 0.24 | 25 | 6.58 | 5.57 | 6.74 | 6.15 | 6.26 | 0.53 | 100 | 5.86E−04 | 1.91 | 4 |
| hsa-miR-486-3p | 4.56 | 3.34 | 4.16 | 3.38 | 3.86 | 0.60 | 75 | 1.93 | 2.24 | 2.12 | 2.76 | 2.26 | 0.35 | 0 | 3.76E−03 | −1.60 | 3 |
| hsa-miR-486-5p | 7.17 | 7.37 | 6.77 | 7.16 | 7.12 | 0.25 | 100 | 6.30 | 6.56 | 6.35 | 6.76 | 6.49 | 0.21 | 100 | 8.79E−03 | −0.63 | 2 |
| hsa-miR-487b | 5.04 | 4.52 | 5.08 | 4.59 | 4.81 | 0.29 | 75 | 6.02 | 6.23 | 6.18 | 6.22 | 6.16 | 0.10 | 100 | 1.18E−04 | 1.35 | 3 |
| hsa-miR-493* | 2.79 | 3.07 | 2.56 | 2.62 | 2.76 | 0.23 | 0 | 4.01 | 3.99 | 4.76 | 3.44 | 4.05 | 0.54 | 75 | 4.59E−03 | 1.29 | 2 |
| hsa-miR-494 | 12.26 | 12.64 | 12.70 | 11.88 | 12.37 | 0.38 | 100 | 13.78 | 14.13 | 13.15 | 13.22 | 13.57 | 0.47 | 100 | 7.35E−03 | 1.20 | 2 |
| hsa-miR-495 | 1.38 | 2.26 | 1.30 | 1.69 | 1.66 | 0.44 | 0 | 3.83 | 4.37 | 5.22 | 3.47 | 4.22 | 0.76 | 75 | 1.10E−03 | 2.56 | 6 |
| hsa-miR-500* | 6.95 | 7.12 | 6.94 | 6.86 | 6.97 | 0.11 | 100 | 6.57 | 6.23 | 6.20 | 6.45 | 6.36 | 0.18 | 100 | 1.16E−03 | −0.61 | 2 |
| hsa-miR-502-3p | 6.36 | 6.23 | 6.12 | 6.06 | 6.19 | 0.13 | 100 | 6.01 | 5.78 | 5.67 | 5.91 | 5.84 | 0.15 | 100 | 1.26E−02 | −0.35 | 1 |
| hsa-miR-505 | 8.11 | 7.79 | 7.52 | 7.75 | 7.79 | 0.24 | 100 | 6.86 | 6.30 | 5.83 | 7.02 | 6.50 | 0.55 | 100 | 5.00E−03 | −1.29 | 2 |
| hsa-miR-505* | 6.09 | 5.96 | 5.89 | 5.96 | 5.98 | 0.08 | 100 | 5.11 | 4.85 | 4.04 | 5.26 | 4.81 | 0.54 | 100 | 5.46E−03 | −1.16 | 2 |
| hsa-miR-513a-5p | 7.78 | 8.21 | 8.62 | 7.32 | 7.98 | 0.56 | 100 | 9.60 | 9.86 | 9.40 | 9.15 | 9.50 | 0.30 | 100 | 3.03E−03 | 1.52 | 3 |
| hsa-miR-513b | 6.57 | 7.05 | 7.18 | 6.11 | 6.73 | 0.49 | 100 | 8.15 | 8.44 | 7.76 | 7.59 | 7.99 | 0.38 | 100 | 6.60E−03 | 1.26 | 2 |
| hsa-miR-513c | 5.23 | 5.92 | 6.04 | 5.02 | 5.55 | 0.50 | 100 | 6.93 | 7.29 | 6.41 | 6.47 | 6.78 | 0.42 | 100 | 9.48E−03 | 1.22 | 2 |
| hsa-miR-532-3p | 6.64 | 6.75 | 6.39 | 6.23 | 6.50 | 0.24 | 100 | 5.99 | 5.66 | 5.83 | 6.01 | 5.87 | 0.16 | 100 | 4.57E−03 | −0.63 | 2 |
| hsa-miR-532-5p | 7.55 | 7.70 | 7.28 | 7.43 | 7.49 | 0.18 | 100 | 6.90 | 6.61 | 6.99 | 6.88 | 6.84 | 0.16 | 100 | 1.75E−03 | −0.65 | 2 |
| hsa-miR-625 | 7.52 | 7.55 | 7.46 | 7.17 | 7.43 | 0.17 | 100 | 6.36 | 5.21 | 6.04 | 6.82 | 6.11 | 0.68 | 100 | 9.38E−03 | −1.32 | 2 |
| hsa-miR-629* | 4.72 | 4.69 | 4.82 | 5.10 | 4.83 | 0.19 | 100 | 5.85 | 5.07 | 5.87 | 5.61 | 5.60 | 0.37 | 100 | 1.01E−02 | 0.77 | 2 |
| hsa-miR-630 | 6.60 | 7.55 | 8.09 | 7.04 | 7.32 | 0.64 | 100 | 9.09 | 9.24 | 10.69 | 8.74 | 9.44 | 0.86 | 100 | 7.55E−03 | 2.12 | 4 |
| hsa-miR-654-5p | 4.44 | 4.63 | 4.89 | 4.32 | 4.57 | 0.25 | 100 | 5.19 | 5.37 | 5.10 | 5.00 | 5.17 | 0.16 | 100 | 6.57E−03 | 0.59 | 2 |
| hsa-miR-768-3p | 13.48 | 13.54 | 13.22 | 13.17 | 13.35 | 0.19 | 100 | 12.09 | 11.17 | 10.86 | 12.44 | 11.64 | 0.75 | 100 | 4.35E−03 | −1.71 | 3 |
| hsa-miR-769-5p | 5.79 | 5.79 | 5.54 | 5.72 | 5.71 | 0.12 | 100 | 5.47 | 4.65 | 4.93 | 5.18 | 5.06 | 0.35 | 100 | 1.24E−02 | −0.66 | 2 |
| hsa-miR-96 | 3.55 | 4.40 | 2.79 | 4.13 | 3.72 | 0.71 | 0 | 7.00 | 6.60 | 7.43 | 6.35 | 6.84 | 0.47 | 100 | 3.31E−04 | 3.13 | 9 |
| hsa-miR-98 | 8.07 | 7.84 | 7.57 | 7.85 | 7.83 | 0.20 | 100 | 8.52 | 8.38 | 8.93 | 8.78 | 8.65 | 0.25 | 100 | 2.16E−03 | 0.82 | 2 |
| hsa-miR-99b* | 4.12 | 3.82 | 4.38 | 4.31 | 4.16 | 0.25 | 0 | 4.83 | 4.89 | 4.73 | 4.47 | 4.73 | 0.19 | 100 | 1.06E−02 | 0.57 | 1 |

SD, standard deviation;
%, percentage of samples expressing miRNA above background levels;
Log2Diff, difference in VSN-transformed expression between LNpos and LNneg samples;
FC, fold change.

### Example 48

### ORT-PCR Verification of Differentially Expressed miRNAs Using FFPE Melanoma Samples and FFPE Cancer-positive Lymph Nodes from Melanoma Patients

[0379] The inventors further evaluated differential expression of miRNAs using a set of formalin-fixed, paraffin-embedded (FFPE) tissue samples that included four cancer-positive lymph nodes (LNpos5-8) and three melanoma samples (MEL4-6) (Tables 8 and 9). These samples were independent and distinct from the frozen melanoma biopsy samples (Table 8) and the frozen cancer-positive lymph node samples (Table 9) previously evaluated (Examples 11, 12, and 13).

[0380] QRT-PCR quantification of 14 selected miRNAs was performed using TaqMang MicroRNA Assays (Applied Biosystems) as described in Example 13. Differential expression of the miRNAs was evaluated by comparing the expression level of each miRNA in MEL4-6 (FIG. 17A) and in LNpos5-8 (FIG. 17B) with their expression levels in LNneg1-7. These experiments confirmed the differential expression, between MEL4-6 and LNneg1-7, for the 14 miRNAs (FIG. 17A). These experiments also verified the differential expression of miR-513 (FIGS. 17A,17B) which had been previously identified as differentially expressed by array analysis (Table 10, Table 11), but which had not been evaluated by qRT-PCR. In addition, these experiments confirmed the differential expression of seven of the 14 miRNAs between cancer-positive lymph nodes (LNpos5-8) and cancer-negative lymph nodes (LNneg1-7) (FIG. 17B). The cancer-positive lymph node designated LNpos8 was an outlier for miR-211, the most differentially expressed miRNA of the fourteen evaluated here (FIG. 17B). In addition, LNpos8, like LNpos1A, had higher expression of miR-203 than was observed for the LNneg samples. However, the differential expression of the other miRNAs in LNpos8 vs LNneg1-7 was consistent with the pattern observed for the other cancer-positive lymph nodes (LNpos5-7, FIG. 17B).

[0381] QRT-PCR quantification of fourteen different miRNAs, in all 15 lymph node samples from melanoma patients (Table 9) is summarized in FIG. 18. The inventors have identified two subgroups of cancer-positive lymph nodes (LNposA, LNposB) from melanoma patients. The LNposA subgroup is represented by a single cancer-positive lymph node—LNpos1A. The LNposB subgroup is represented by the other cancer-positive lymph nodes (LNpos2-8). Within the LNposB subgroup LNpos8 is an outlier for hsa-miR-211 and hsa-miR-203 expression.

[0382] The inventors have shown that miRNA array profiling and qRT-PCR analysis can distinguish between cancer-positive and cancer-negative lymph nodes from melanoma patients. The inventors have identified seven miRNAs (hsa-miR-211, -514, -506, -509, -508, -513, and -584) (FIG. 18) that are expressed at significantly higher levels in all cancer-positive lymph nodes and melanoma samples than in cancer-negative lymph nodes. The results are consistent when analyses are performed with either frozen biopsy specimens or FFPE tissue samples. These miRNAs represent effective markers for the identification of metastatic melanoma in the lymph nodes.

[0383] In addition, the inventors identified six miRNAs (hsa-miR-200b, -200c, -203, -375, -429, and -592) that are expressed at significantly higher levels in the LNposA subgroup of cancer-positive lymph nodes (FIG. 8, FIG. 18) and in melanoma samples (FIG. 7, FIG. 17) compared to cancer-negative lymph nodes (LNneg). These six miRNAs were not significantly differentially expressed between the LNposB subgroup of cancer-positive lymph nodes and cancer-negative lymph nodes (LNneg) (FIG. 18). These miRNAs represent useful diagnostic markers for distinguishing between the two subgroups (LNposA, LNposB) of cancer-positive lymph nodes in metastatic melanoma patients. The heterogeneity observed in the miRNA expression profiles among the cancer-positive lymph nodes correlates with the fact that melanoma is a heterogeneous disease that involves multiple biological pathways.

### Example 49

### MicroRNA Combinations as Classifiers for Cancer-positive Lymph Nodes in Patients with Melanoma

[0384] The inventors have demonstrated that miRNAs can distinguish cancer-positive from cancer-negative lymph nodes taken from melanoma patients. To further refine the utility of specific microRNA markers as diagnostic analytes, the inventors quantified specific combinations of miRNAs by qRT-PCR and identified combinations that enhanced the distinction between cancer-positive and cancer-negative lymph nodes from melanoma patients. qRT-PCR assays were performed as described above in Example 13. For combinations of two or more miRNAs, the Ct values from the quantification of individual miRNAs were added following their normalization to miR-16. The inventors determined that quantification of several miRNA combinations (miR-211+miR-514; miR-211+miR-506; miR-211+miR-514+miR-506; miR-211+miR-509+miR-508) enhances the distinction between cancer-positive and cancer-negative lymph nodes from melanoma patients (FIG. 19). These combinations serve as non-limiting examples. Other combinations may also be used and combinations may include subtraction of average Ct values. In that case, if an even number of miRNAs is present in the combination, the subtraction of Ct values in a combination eliminates the need to normalize the data.

### REFERENCES

[0385] The following references, to the extent that they provide exemplary procedural or other details supplementary to those set forth herein, are specifically incorporated herein by reference.
[0386] Bagga et al., Cell 122(4):553-563, 2005.
[0387] Bentwich et al., Nat. Genet., 37(7):766-770, 2005.
[0388] Berezikov et al., Cell 120(1):21-24, 2005.
[0389] Breslow, Ann. Surg. 172(5):902-908, 1970.
[0390] Calin and Croce, Nat. Rev. Cancer, 6(11):857-866, 2006.
[0391] Carrington et al. Science, 301(5631):336-338, 2003.
[0392] Clark et al., Cancer Res., 29(3):705-727, 1969.
[0393] Coello et al., Clin. Lung Cancer, 5:214-225, 2004.
[0394] Cummins et al., Proc. Natl. Acad. Sci. USA 103(10):3687-3692, 2006.
[0395] Davison et al., Meth. Enzymol., 411:14-34, 2006.
[0396] D'Cunha et al., Lung Cancer, 48:241-246, 2005.
[0397] Doleshal et al., J. Mol. Diag. 10(3):203-211, 2008.
[0398] Esquela-Kerscher and Slack, Nat Rev Cancer, 6(4):259-269, 2006.
[0399] Ferris et al., Cancer Res., 65:2147-2156, 2005.
[0400] Gillanders et al., Ann. Surg., 239:828-837, 2004.
[0401] Greene, AJCC Cancer Staging Manual (6^{th} ed.) Greene et al. (eds.). Springer-Verlag, New York. 2002.
[0402] Griffiths-Jones et al., Nucleic Acids Res., 34 (Database Issue):D140-D144, 2006.
[0403] Houvenaeghel et al., J. Clin. Oncol., 24:1814-1822, 2006.
[0404] Huber et al., Bioinformatics, 18:Suppl 1:S96-104, 2002.
[0405] Hughes et al., Ann. Surg., 243:389-398, 2006.
[0406] Kammula et al., J. Clin. Oncol., 22:3989-3996, 2004.
[0407] Lagos-Quintana et al., Science, 294(5543):853-858, 2001.
[0408] Lau et al., Science, 294(5543):858-862, 2001.
[0409] Lee and Ambros, Science, 294(5543):862-864, 2001.
[0410] Lim et al., Nature, 433(7027):769-773, 2005.
[0411] MAQC Consortium, Nature Biotech. 24:1151-1161, 2006.
[0412] Roberts et al., Am. J. Surg., 186:324-329, 2003.
[0413] Schurr et al., J. Surg. Oncol., 94:307-315, 2006.
[0414] Scoggins et al., J. Clin. Oncol., 24:2849-2857, 2006.
[0415] Shingara et al, RNA, 9:1461-1470, 2005
[0416] Sobin and Wittekind, TNM Classification of Malignant Tumors (6^{th} ed.), Sobin and Wittekind (eds.), John Wiley and Sons, New Jersey. 2002.
[0417] Takeuchi et al, J. Clin. Oncol., 22:2671-2680, 2004.
[0418] Wang et al., RNA 13:1-9. 2007.
[0419] Xi et al., Clin. Cancer Res., 11: 1099-1109, 2005.
[0420] Xi et al., Clin. Cancer Res., 12:2484-2491, 2006.
[0421] Xie et al., Nature 434(7031):338-345, 2005

The application's sequence listing, which the Patent Office published only in electronic form, follows.

SEQUENCE LISTING (4099 sequences)

SEQ ID NO: 1 - RNA, 22 nt, Homo sapiens
uauuuauaccuggucucauucc

SEQ ID NO: 2 - RNA, 66 nt, Homo sapiens
uguuuauuuauaccuggucucauuccacaagggauuuguggagugugauucaguauaauauaaaua

SEQ ID NO: 3 - RNA, 22 nt, Homo sapiens
uuucaggccucaguuuccuccu

SEQ ID NO: 4 - RNA, 101 nt, Homo sapiens
ccucacuugacagaggaaacugaaguccagaaaggggacgggauuagaauguccaacagaaguaccuuucaggccucaguuuccuccuuugucacaugagg

SEQ ID NO: 5 - RNA, 21 nt, Homo sapiens
uucucaggcaauccucagcca

SEQ ID NO: 6 - RNA, 86 nt, Homo sapiens
cagauauuuucucaggcaauccucagccacagccuucuuggcugcaaaaccaaauggcuggcuacucauguacuguugaaugucug

SEQ ID NO: 7 - RNA, 22 nt, Homo sapiens
auucaagcuuuggaugagcagu

SEQ ID NO: 8 - RNA, 88 nt, Homo sapiens
ggagccucguuuacccucaucuggggcuuuaauggaaguuuuaagucaaugggaaauucaagcuuuggaugagcagugaauguggccu

SEQ ID NO: 9 - RNA, 22 nt, Homo sapiens
gccucugauuuuagaucaagag

SEQ ID NO: 10 - RNA, 79 nt, Homo sapiens
gcaggugccuuuugaugagaacaucuggggccuucaggagauuuccaugggccucugauuuuagaucaagaggacuugc

SEQ ID NO: 11 - RNA, 22 nt, Homo sapiens
gcaggagacuaaggggguguug

SEQ ID NO: 12 - RNA, 86 nt, Homo sapiens
ccaucccuggccagcagccccagcuccagccccagcacaccaccaccagggcaggagacuaaggggguguuggacaagaaggaagg

SEQ ID NO: 13 - RNA, 22 nt, Homo sapiens
aacuagcugccugccuugaggu

SEQ ID NO: 14 - RNA, 84 nt, Homo sapiens
caggagagaaguuucuaaaggaggcaguauagauuguugcaacuguuucuuaaacuagcugccugccuugagguuuuucuccug

SEQ ID NO: 15 - RNA, 22 nt, Homo sapiens
uccccuagauacgaauuuguga

SEQ ID NO: 16 - RNA, 114 nt, Homo sapiens
gagcggaguguuuaugucaacuacauauuccccuagauacgaauuugugaccacaaaauuccuuacacaaauucggaucuacaggguauauacagaagacagacagaucuucuu

SEQ ID NO: 17 - RNA, 22 nt, Homo sapiens
ugaaggaggcagaccagggauu

SEQ ID NO: 18 - RNA, 115 nt, Homo sapiens
uuucucacaccugucaggcccuagcaaugccacucugcuuccuuuaucccauccguacccaaucccgugaaggaggcagaccagggauugccucucccauuuugcagaugaggaa

SEQ ID NO: 19 - RNA, 22 nt, Homo sapiens
acuagagggcaggaggccagag

SEQ ID NO: 20 - RNA, 75 nt, Homo sapiens
ccaggcuuguggccuguucugccuucugaguuucugugcuuuuagguaacuagagggcaggaggccagagucugg

SEQ ID NO: 21 - RNA, 22 nt, Homo sapiens
augaguguaguuguagggagcg

SEQ ID NO: 22 - RNA, 81 nt, Homo sapiens
agcuuuccaggaucuccugcaauuacacugguuggaguuagccacgaauuaaugaguguaguuguagggagcgggaagguu

SEQ ID NO: 23 - RNA, 22 nt, Homo sapiens
aucuggggcuggggucgcggcc

SEQ ID NO: 24 - RNA, 163 nt, Homo sapiens
ggcccugggaugggcaaccacaguaacuuccacggagguuucagcaguggcaucuggggcuggggucgcggccguggacagcaccggagccgggaccaaggccacggagcuugcagaggcaaggccgaggauaaggaguggaugcccaucaccaagcugggcc

SEQ ID NO: 25 - RNA, 22 nt, Homo sapiens
caaggcuuucucaaauaggaua

SEQ ID NO: 26 - RNA, 77 nt, Homo sapiens
augugcuguuuugcuguuugggaguguuuuguauauacuuuuuaaaauacaaggcuuucucaaauaggauagaccau

SEQ ID NO: 27 - RNA, 22 nt, Homo sapiens
caagguggguuuugcauugucc

SEQ ID NO: 28 - RNA, 86 nt, Homo sapiens
ucccucuauacaagguggguuuugcauugucccacacauagucugcugauggccgugggauggcaaagucaucuucauuagacgga

SEQ ID NO: 29 - RNA, 22 nt, Homo sapiens
caggaucucagauacacuccug

SEQ ID NO: 30 - RNA, 97 nt, Homo sapiens
agcaguacaggaucucagauacacuccugacuccuaauggugcucuguucuucccaccugccccuucucucaggaugccucuggauccccaccugcu

SEQ ID NO: 31 - RNA, 22 nt, Homo sapiens
cagguuuuauugaacacaugua

SEQ ID NO: 32 - RNA, 83 nt, Homo sapiens
ucucauguguucuacaaaccuguaaaagguccuugcagcuucaacgagcuucccccguacagguuuuauugaacacauguagg

SEQ ID NO: 33 - RNA, 22 nt, Homo sapiens
ccauuagaagggcuggaagaag

SEQ ID NO: 34 - RNA, 76 nt, Homo sapiens
augcuccuaccauuagaagggcuggaagaaggcaucucccucagccuucuuccagcucuucuaaugguaagagcau

SEQ ID NO: 35 - RNA, 22 nt, Homo sapiens
cccagagcaugcagugugaaca

SEQ ID NO: 36 - RNA, 99 nt, Homo sapiens
cuggacuuggcucuaggaugugcucauugcaugggcuguguauaguauuauucaauacccagagcaugcagugugaacauaauagagauugaaagacag

SEQ ID NO: 37 - RNA, 22 nt, Homo sapiens
cccugagcacauuugaaacauu

SEQ ID NO: 38 - RNA, 144 nt, Homo sapiens
gccgcgugcaacuguuuucgaaaaccugggaugaucauuuaaauguuuaaaauaugcacaugguaauucaaaacuaauuacccugagcacauuugaaacauuuaugccaucgucucuggauccugccuacugauugugcgcggc

SEQ ID NO: 39 - RNA, 22 nt, Homo sapiens
ccuaagagcaacggggugcauu

SEQ ID NO: 40 - RNA, 171 nt, Homo sapiens
ugacaaaagcaaggaaauucacaguuaaaggggaaacgugccauauguucuucaauaccuaagagcaacggggugcauuuggaaagucauuaaagcggcacccaguugugccuagguauuggagaacauauggaaucuuuuccuccgcgaguguaauuuucccugcucuca

SEQ ID NO: 41 - RNA, 22 nt, Homo sapiens
ccuuccaaagcaauacucacca

SEQ ID NO: 42 - RNA, 81 nt, Homo sapiens
cuggugaugcuuagggagaagugguuagguucacacugugugguugagagcaccccuaccuuccaaagcaauacucaccag

SEQ ID NO: 43 - RNA, 22 nt, Homo sapiens
uccgucucccgcuugcaguagg

SEQ ID NO: 44 - RNA, 61 nt, Homo sapiens
cuccgucucccgcuugcaguaggaauaccugugauuccugugcugcgaguacgagccggag

SEQ ID NO: 45 - RNA, 19 nt, Homo sapiens
gauuguguaaggguacagu

SEQ ID NO: 46 - RNA, 76 nt, Homo sapiens
cucagacuguacucuucuagccaucugaaauacguuuucuagguagagauagauuguguaaggguacaguugugag

SEQ ID NO: 47 - RNA, 22 nt, Homo sapiens
gcacgggagcaccaagagggca

SEQ ID NO: 48 - RNA, 94 nt, Homo sapiens
uggcugacuugccucucucuguuggcuucugugcuguucuguguugcucucugccuccuccacuagcacgggagcaccaagagggcaggagcca

SEQ ID NO: 49 - RNA, 22 nt, Homo sapiens
gcagucauuaggcacauuagca

SEQ ID NO: 50 - RNA, 96 nt, Homo sapiens
agaaagauucagugauacuaauaugucuaaugauugcuaagcacaaccacagacacuagcagucauuaggcacauuagcaucacuggauugauucu

SEQ ID NO: 51 - RNA, 22 nt, Homo sapiens
agagaacuaggaucaaccaaca

SEQ ID NO: 52 - RNA, 74 nt, Homo sapiens
cucagaucuuggaagaucuuggcucuuuuguuggauuucuucaaggagagaacuaggaucaaccaacaguugag

SEQ ID NO: 53 - RNA, 22 nt, Homo sapiens
agggaaggccagcaucugaaau

SEQ ID NO: 54 - RNA, 123 nt, Homo sapiens
ugauagcccugcccuuucccaggcuucugugcagggaccuuugcugccugcaaacaguagggacaccuguuuucugagcagggaaggccagcaucugaaaucuuaggaauggggcugcuauua

SEQ ID NO: 55 - RNA, 22 nt, Homo sapiens
gcccccgggaaggguuguuguc

SEQ ID NO: 56 - RNA, 72 nt, Homo sapiens
gcccccgggaaggguuguugucuuugugccauauccaaacagagggcuuuuaauagcagcuuccuguggggc

SEQ ID NO: 57 - RNA, 22 nt, Homo sapiens
gcuauaaccauuuuucugcccu

SEQ ID NO: 58 - RNA, 94 nt, Homo sapiens
gaggcugaggcccacgggaggaggcagaaaugguagcuggucccaagcuccuuagcuauaaccauuuuucugcccuucccauggcuucagucuu

SEQ ID NO: 59 - RNA, 22 nt, Homo sapiens
ggaaagggaggacaggaacagg

SEQ ID NO: 60 - RNA, 69 nt, Homo sapiens
uuuuuuuuucccuucucccuucaccauuaccccacuuugugguaggaaagggaggacaggaacaggaga

SEQ ID NO: 61 - RNA, 22 nt, Homo sapiens
ggaacuguggucauugcagggu

SEQ ID NO: 62 - RNA, 72 nt, Homo sapiens
aguaggaacuguggucauugcaggguaaaguugcacaccuacucauucuuuugugaugaucauguuuuuacu

SEQ ID NO: 63 - RNA, 22 nt, Homo sapiens
ggcuggggagggaaagggauac

SEQ ID NO: 64 - RNA, 79 nt, Homo sapiens
aucugaaacagaaccuuugcccuccuuuccuacucugcaaaacccugauaggcuggggagggaaagggauacuucaggu

SEQ ID NO: 65 - RNA, 22 nt, Homo sapiens
ggcuuuuaguuuccauagaaaa

SEQ ID NO: 66 - RNA, 67 nt, Homo sapiens
ugguaggcuuuuaguuuccauagaaaauaaucucucauuguuuucaaaagaaacugaaagcacccca

SEQ ID NO: 67 - RNA, 22 nt, Homo sapiens
gggaccagcuccaggggaaggg

SEQ ID NO: 68 - RNA, 84 nt, Homo sapiens
guuagggaccagcuccaggggaagggagacuggaaggagagccacagccuuccccugaccuucugccuguagaugguuccugcc

SEQ ID NO: 69 - RNA, 22 nt, Homo sapiens
agagccaggggugguggcugau

SEQ ID NO: 70 - RNA, 80 nt, Homo sapiens
aaggaaggaagggccacuuacuccugcuguccagggaauucccggcagggagagccaggggugguggcugaucuggccuu

SEQ ID NO: 71 - RNA, 22 nt, Homo sapiens
gggcccuggcuccaucuccuuu

SEQ ID NO: 72 - RNA, 92 nt, Homo sapiens
caccuaccuaacuggguuagggcccuggcuccaucuccuuuaggaaaaccuucuguggggaguggggcuucgacccuaacccaggugggcug

SEQ ID NO: 73 - RNA, 22 nt, Homo sapiens
gggggaaguuggggaggaauga

SEQ ID NO: 74 - RNA, 101 nt, Homo sapiens
cuggcuucaucugauaaggguuuauuuuugauccagaccuccuuggaauguuuaucuuagggggaaguuggggaggaaugagcucaguagaauugggccag

SEQ ID NO: 75 - RNA, 22 nt, Homo sapiens
gugauuauuuacaguuuaggug

SEQ ID NO: 76 - RNA, 82 nt, Homo sapiens
uucuguccuuagugauuauuuacaguuuagguguuuauuuucugucuuuuucaacuagacuguaaguuccaugagggcagga

SEQ ID NO: 77 - RNA, 22 nt, Homo sapiens
uagggguuaccuuuagcaucuc

SEQ ID NO: 78 - RNA, 89 nt, Homo sapiens
gggaggcaaacuauagggguuaccuuuagcaucuccccucucugaucacacuauggagggaugccaaaagugccccccauaguucuccc

SEQ ID NO: 79 - RNA, 22 nt, Homo sapiens
uaaagagaccauggcuucucaa

SEQ ID NO: 80 - RNA, 139 nt, Homo sapiens
guucccuagguuuccaagguccaaggccccaggaaauauaaagagaccauggcuucucaaacauuaaaguuuagaggagaagccacuggucuauuuauauuuccucugccacuuaggccuuaggaucauuguagggggc

SEQ ID NO: 81 - RNA, 22 nt, Homo sapiens
  miRNA
uaagacgaacaaaagguuuguc

SEQ ID NO: 82 - RNA, 83 nt, Homo sapiens
uucuccucucagggaagcuuuuugcucgaauuauguuucugauccgaauauaagacgaacaaaagguuugucugagggcagag

SEQ ID NO: 83 - RNA, 22 nt, Homo sapiens
uaauugggagagaagggaauua

SEQ ID NO: 84 - RNA, 82 nt, Homo sapiens
ugggggaaauauaauugggagagaagggaauuaaugcuaucaggugucucuuaauuucucagucucucucauauuaccccca

SEQ ID NO: 85 - RNA, 22 nt, Homo sapiens
uacguauguaucacacaguuac

SEQ ID NO: 86 - RNA, 83 nt, Homo sapiens
uaacuacugagauguguaucauauauauguauguaugaaaaugacuugaaguauacguauguaucacacaguuacaguaguua

SEQ ID NO: 87 - RNA, 22 nt, Homo sapiens
uauagauuuaaauacguaugua

SEQ ID NO: 88 - RNA, 125 nt, Homo sapiens
uguguagaugacugaaucuaugcaguggaguauauauauauguguguguguguauacauauaauauguauauagauuuaaauacguauguauuuaugcgccagcaugggcaacaugucucuacca

SEQ ID NO: 89 - RNA, 22 nt, Homo sapiens
ucccaggcccgggauuaggcac

SEQ ID NO: 90 - RNA, 65 nt, Homo sapiens
aguaucccaggcccgggauuaggcacugaggacacacagaugaccaugaucuggucugggaugcu

SEQ ID NO: 91 - RNA, 22 nt, Homo sapiens
uauugauuucagacccaguuuu

SEQ ID NO: 92 - RNA, 102 nt, Homo sapiens
aaauccuuucuaacagugccuauauugauuucagacccaguuuuguuuuaaaauucaaggacagaauuugguccuguguuuagagguccuuaauaaggauuu

SEQ ID NO: 93 - RNA, 22 nt, Homo sapiens
ucacaauauaguggaagacaca

SEQ ID NO: 94 - RNA, 77 nt, Homo sapiens
uaguguguguguuucuuccacuauauggugauaucguggaagaauaucacaauauaguggaagacacaaacauacua

SEQ ID NO: 95 - RNA, 22 nt, Homo sapiens
ucagucuguuggaauaucgcug

SEQ ID NO: 96 - RNA, 79 nt, Homo sapiens
aaaccuuaucagucuguuggaauaucgcugcaaaaccauguuuugaacggguguguucugucagacugauuggagguuu

SEQ ID NO: 97 - RNA, 22 nt, Homo sapiens
ucauaaagguggcgaugguaug

SEQ ID NO: 98 - RNA, 68 nt, Homo sapiens
ggauaucauaaagguggcgaugguaugucacuauccggugaaacugcuugccuuccuucaugauuucc

SEQ ID NO: 99 - RNA, 22 nt, Homo sapiens
ucuccugggguuuggggugggu

SEQ ID NO: 100 - RNA, 91 nt, Homo sapiens
agccuucuaucuccugggguuugggguggguuguaguucaggggucaccuaccuuuacccaccaacuaaauuaaccaggaauaguaggacu

SEQ ID NO: 101 - RNA, 22 nt, Homo sapiens
ucucuccuuccuccucaguuuu

SEQ ID NO: 102 - RNA, 117 nt, Homo sapiens
uauguacccagagccaaaagugauuggaggugggugggguuaaugaauagacaaguguuaaaacuaaaagucaugccuaucucuccuuccuccucaguuuuggcuugauuuuucaug

SEQ ID NO: 103 - RNA, 22 nt, Homo sapiens
ucugccuuccggggacgguagg

SEQ ID NO: 104 - RNA, 87 nt, Homo sapiens
ggcccgagggguuaucugccuuccggggacgguaggggauguagacaagagccuagcguuccuggaaacagguguuuaauuugggcc

SEQ ID NO: 105 - RNA, 22 nt, Homo sapiens
uggagguuguccaugguguguu

SEQ ID NO: 106 - RNA, 102 nt, Homo sapiens
cccaagucagguacucgaauggagguuguccaugguguguucauuuuauuuaugaugaguauuacauggccaaucuccuuucgguacucaauucuucuuggg

SEQ ID NO: 107 - RNA, 22 nt, Homo sapiens
ugcucauuuaaccauuuagaua

SEQ ID NO: 108 - RNA, 68 nt, Homo sapiens
aaccuaucugagugguuaagugagcauacuuuuugaccuguaugcucauuuaaccauuuagauaaguu

SEQ ID NO: 109 - RNA, 22 nt, Homo sapiens
cacggguuaggcucuugggagc

SEQ ID NO: 110 - RNA, 88 nt, Homo sapiens
ugcgcuccucucagucccugagacccuaacuugugauguuuaccguuuaaauccacggguuaggcucuugggagcugcgagucgugcu

SEQ ID NO: 111 - RNA, 22 nt, Homo sapiens
  miRNA
ugggagggggcugugugcaccu

SEQ ID NO: 112 - RNA, 104 nt, Homo sapiens
ucaggcagccuuucugacccauguagggucacagaccccagcccacacugggcauggccuaugggagggggcugugugcaccugcaggaaaggauacagccugg

SEQ ID NO: 113 - RNA, 22 nt, Homo sapiens
ugggauauccuguuuuccauuu

SEQ ID NO: 114 - RNA, 79 nt, Homo sapiens
uacaagagagaaaaugagggcagguaucaaccauaccaaauuauucuaugggauauccuguuuuccauuuuaccuugua

SEQ ID NO: 115 - RNA, 22 nt, Homo sapiens
uggugggaagagcuuggacuuu

SEQ ID NO: 116 - RNA, 109 nt, Homo sapiens
ggcugcaccugaacuuguugguauggugggaagagcuuggacuuucaagucagucaucuggauuugaauccuggcuuuaccacuuaccagcuuugugaucuuggcaguc

SEQ ID NO: 117 - RNA, 22 nt, Homo sapiens
caagaugcggguuaagggccag

SEQ ID NO: 118 - RNA, 58 nt, Homo sapiens
acaagaugcggguuaagggccagaggcaaaacccagggcccuuaaacuagccaaucau

SEQ ID NO: 119 - RNA, 22 nt, Homo sapiens
ugguucuugugaaacuggaagu

SEQ ID NO: 120 - RNA, 65 nt, Homo sapiens
ugguucuugugaaacuggaaguaagggguggaguucacugaugacucccagguucauagcugcua

SEQ ID NO: 121 - RNA, 22 nt, Homo sapiens
ugugccauguuggugugcugca

SEQ ID NO: 122 - RNA, 82 nt, Homo sapiens
aaguucuaggguacaugugcacaacgugcagguuuguuacauauguauauaugugccauguuggugugcugcacccuuucuu

SEQ ID NO: 123 - RNA, 22 nt, Homo sapiens
uguggggugggaggugagggga

SEQ ID NO: 124 - RNA, 69 nt, Homo sapiens
gaguauguggggugggaggugaggggaagaggaucccucuucucuuucuccuuccuuuuccuauaucuc

SEQ ID NO: 125 - RNA, 22 nt, Homo sapiens
  miRNA
uuauuaggauagggaaagaggg

SEQ ID NO: 126 - RNA, 80 nt, Homo sapiens
uguaaagcuauuauuaggauagggaaagagggcugguaaauacgacugguccuuccuuccuuccuggugcuacuuuuaca

SEQ ID NO: 127 - RNA, 22 nt, Homo sapiens
uucagagacugguuaucauuca

SEQ ID NO: 128 - RNA, 104 nt, Homo sapiens
gugggggaggaagcugauauuuauucagagacugguuaucauucacugccuacgugaccucgggcgguaaugaaccaucucugagccucaguuucuuccuuugc

SEQ ID NO: 129 - RNA, 22 nt, Homo sapiens
  miRNA
uucagagauuugaguuuaagaa

SEQ ID NO: 130 - RNA, 121 nt, Homo sapiens
cauuauaagcaaauauauggaagcauauucuuaaacuacaaaacucuuucgaguggcauuuugugagaauuauucagagauuugaguuuaagaaauauguuccuauauguuguuuacaaug

SEQ ID NO: 131 - RNA, 22 nt, Homo sapiens
uuuucauggcgaggcuucaugg

SEQ ID NO: 132 - RNA, 81 nt, Homo sapiens
gcaucuguuuauuuucauggcgaggcuucauggggacgggaacaaguccuugaugagcgccugccagagcugggcaggugu

SEQ ID NO: 133 - RNA, 22 nt, Homo sapiens
aaaggaggcagaguagccaagc

SEQ ID NO: 134 - RNA, 72 nt, Homo sapiens
ggguuuucaaaggaggcagaguagccaagcucuuggcacaagagccagcuguacugccugcucaggaaaucu

SEQ ID NO: 135 - RNA, 22 nt, Homo sapiens
uuuguuucucuucuguagugcu

SEQ ID NO: 136 - RNA, 91 nt, Homo sapiens
gucagaaguauuuucccaacugcagaugugaaauaggcugguuauacacaucuauuuguuucucuucuguagugcugaaaauuauauugau

SEQ ID NO: 137 - RNA, 22 nt, Homo sapiens
aaaaauagaucaaaugguggug

SEQ ID NO: 138 - RNA, 143 nt, Homo sapiens
ggaauucuucauaaccgaaguguguuuuccccgaggaguuaugcuaccauuugauuuaauuuuuaauuuuuacauuuuaaucaaaaauagaucaaauggugguggucucuccggggaaacacacuucagauaggaagccggcc

SEQ ID NO: 139 - RNA, 22 nt, Homo sapiens
aaaggauagggaggccucucag

SEQ ID NO: 140 - RNA, 114 nt, Homo sapiens
ucuagaaaucugaacaggcacggauaggacagagggcuccucuaacuauugggguguggggcaguucaaaggauagggaggccucucagaggccuugaaguuggguuuuguaga

SEQ ID NO: 141 - RNA, 22 nt, Homo sapiens
gaggcagagaugaguaagacag

SEQ ID NO: 142 - RNA, 79 nt, Homo sapiens
aaggaggcagagaugaguaagacaggagguggcuaguuauaaauuccucggcugugucuuauucaucucugcuugccuu

SEQ ID NO: 143 - RNA, 22 nt, Homo sapiens
aauaaagucaggcaguggagga

SEQ ID NO: 144 - RNA, 111 nt, Homo sapiens
uuuauaauuuuauuucaugcacuacuuggcuuuacugauuaauaugccccauggcauucaauaaagucaggcaguggaggaaauaagagugguauuaauuucuaacauugc

SEQ ID NO: 145 - RNA, 22 nt, Homo sapiens
acaagggcagcacagugaggac

SEQ ID NO: 146 - RNA, 74 nt, Homo sapiens
gcuucuguccugugcugugcaucuugaugaccuaggccugaaggucacaagggcagcacagugaggacuuaagc

SEQ ID NO: 147 - RNA, 22 nt, Homo sapiens
acacaguaacaauuuuccgcua

SEQ ID NO: 148 - RNA, 118 nt, Homo sapiens
uuccugaagcuagggggugggaguguuauucacggaaaauugaaggcuuguugagucaauaaucuucuuucacacaguaacaauuuuccgcuaaaauuucuugacccaaacaaaggaa

SEQ ID NO: 149 - RNA, 18 nt, Homo sapiens
aggugggggcacauaugu

SEQ ID NO: 150 - RNA, 67 nt, Homo sapiens
gcaucuggccuccugccugauucaaaucgaaccuaaccugaugucuuucaggugggggcacauaugu

SEQ ID NO: 151 - RNA, 22 nt, Homo sapiens
agggcaugggaaggacccaagg

SEQ ID NO: 152 - RNA, 99 nt, Homo sapiens
uugcugggagcaaccuuugguccuuccauugguccuagggcugaucuaggcugcuagaucagggcaugggaaggacccaagguugguacuccucaggaa

SEQ ID NO: 153 - RNA, 18 nt, Homo sapiens
aggcuggagugcaguggu

SEQ ID NO: 154 - RNA, 173 nt, Homo sapiens
gccacugcacucuagccuggcaaaagagcaaggcuccaucucaaaaaagaaaaaaaauuauagcaguugauguaaaugaaauagcaauaaaacuugcuauacaucuuuuccuaaaugauuuuuuuucuuugagacaaggucucacucugucacucaggcuggagugcaguggu

SEQ ID NO: 155 - RNA, 22 nt, Homo sapiens
uacuguaguaugggcacuucca

SEQ ID NO: 156 - RNA, 69 nt, Homo sapiens
aguaccaaagugcucauagugcagguaguuuuggcaugacucuacuguaguaugggcacuuccaguacu

SEQ ID NO: 157 - RNA, 22 nt, Homo sapiens
auuguuccaggugcuguggauu

SEQ ID NO: 158 - RNA, 117 nt, Homo sapiens
cucaucaggauuuuaagauggugaaucuauagugcccggaaugugaugaugauuguggucauuguuccaggugcuguggauucacuauccugaaauccuuacaacaaccuuuuugag

SEQ ID NO: 159 - RNA, 22 nt, Homo sapiens
auuugcuguggggcagacugug

SEQ ID NO: 160 - RNA, 62 nt, Homo sapiens
gcucaguuugcugcacagauauuuggguuaaacaaucauuugcuguggggcagacugugagc

SEQ ID NO: 161 - RNA, 22 nt, Homo sapiens
caagaguggcagcgggaacuga

SEQ ID NO: 162 - RNA, 88 nt, Homo sapiens
ucuggggccggucacucaguuuuuggccucugcugcaguccucauacuguuccaagaguggcagcgggaacugagaggccccuccaga

SEQ ID NO: 163 - RNA, 22 nt, Homo sapiens
caagggucagggccgaagggag

SEQ ID NO: 164 - RNA, 86 nt, Homo sapiens
gcucccccucaccccggccucccugaacuuugggguugccguggugacugccuccaagggucagggccgaagggagaggguggggc

SEQ ID NO: 165 - RNA, 22 nt, Homo sapiens
gacagcacgacacugccuucau

SEQ ID NO: 166 - RNA, 84 nt, Homo sapiens
acuggucggugauuuagguaguuuccuguuguugggauccaccuuucucucgacagcacgacacugccuucauuacuucaguug

SEQ ID NO: 167 - RNA, 22 nt, Homo sapiens
ggcuucuuuacagugcugccuu

SEQ ID NO: 168 - RNA, 78 nt, Homo sapiens
uacugcccucggcuucuuuacagugcugccuuguugcauauggaucaagcagcauuguacagggcuaugaaggcauug

SEQ ID NO: 169 - RNA, 22 nt, Homo sapiens
ccagagggugcaggggaggcaa

SEQ ID NO: 170 - RNA, 112 nt, Homo sapiens
gcucucaucuggcugcauucaugucauucuugcaucucugggguccuuuuaaccauggccuucccagagggugcaggggaggcaaaugucagcaucccagaccaaggagagc

SEQ ID NO: 171 - RNA, 22 nt, Homo sapiens
uaggcagagaggccauaagaau

SEQ ID NO: 172 - RNA, 83 nt, Homo sapiens
ccugucauucucuaggcagagaggccauaagaauuacacuaccugcgauuuuuaugguccuuuccugccuuaauacuuauagg

SEQ ID NO: 173 - RNA, 22 nt, Homo sapiens
cugaugaaucugaacugagagg

SEQ ID NO: 174 - RNA, 97 nt, Homo sapiens
uuuaacaaauguauuggucuuucaguuuuaauucuuccggauaugauucaauuuccugaugaaucugaacugagaggagaauaacuuauuuguuaaa

SEQ ID NO: 175 - RNA, 22 nt, Homo sapiens
ggaacuucuaggaggcauggaa

SEQ ID NO: 176 - RNA, 139 nt, Homo sapiens
aauguacaguuucuagaaugagaacucuuacccuggcuucggaacuucuaggaggcauggaaacagguauguauagggucuccauuucuccuggaaggcuugaggccagcaaaacuccuuacucuagaaaccggacauu

SEQ ID NO: 177 - RNA, 21 nt, Homo sapiens
ggagggagcuggcuucggcuc

SEQ ID NO: 178 - RNA, 62 nt, Homo sapiens
gggcugaggcugcaguacccaccaggcgguaaugacuucucggagggagcuggcuucggcuc

SEQ ID NO: 179 - RNA, 22 nt, Homo sapiens
ggcucugggucuguggggagcg

SEQ ID NO: 180 - RNA, 95 nt, Homo sapiens
gcggggcgcgucgccccccucaguccaccagagcccggauaccucagaaauucggcucugggucuguggggagcgaaaugcaacccaaaccccgu

SEQ ID NO: 181 - RNA, 22 nt, Homo sapiens
gguucuggggaguuuguggggc

SEQ ID NO: 182 - RNA, 73 nt, Homo sapiens
gguucuggggaguuuguggggccucagguaucaccugggucagaccccauccccacacacccuucuuggaacu

SEQ ID NO: 183 - RNA, 22 nt, Homo sapiens
gucacuucacagucacaccaca

SEQ ID NO: 184 - RNA, 79 nt, Homo sapiens
agcuguccugugggugaugaggaagugaugacaccaacucccaccaucucgucacuucacagucacaccacagauggcu

SEQ ID NO: 185 - RNA, 22 nt, Homo sapiens
uaaccaugucugguaagacgcc

SEQ ID NO: 186 - RNA, 75 nt, Homo sapiens
gcggauggacgguuuuaccagacaguauuagacagagggccaggucuaaccaugucugguaagacgcccaucggc

SEQ ID NO: 187 - RNA, 22 nt, Homo sapiens
uaaagcugaaggggaagaacug

SEQ ID NO: 188 - RNA, 91 nt, Homo sapiens
ggugaguggagagggagcaguuucucuaacagcuggggaaaggggaucaucucuaaagcugaaggggaagaacugcuccguaaaccucacc

SEQ ID NO: 189 - RNA, 22 nt, Homo sapiens
ugcaacgaaccugagccacuga

SEQ ID NO: 190 - RNA, 67 nt, Homo sapiens
auccuugcaacgaaccugagccacugauucaguaaaauacucaguggcacauguuuguugugagggu

SEQ ID NO: 191 - RNA, 22 nt, Homo sapiens
uccaacaauauccuggugcuga

SEQ ID NO: 192 - RNA, 67 nt, Homo sapiens
ucuccaacaauauccuggugcugagugaugacucaggcgacuccagcaucagugauuuuguugaaga

SEQ ID NO: 193 - RNA, 22 nt, Homo sapiens
ugccugucuacacuugcugugc

SEQ ID NO: 194 - RNA, 110 nt, Homo sapiens
ggccuggcuggacagaguugucaugugucugccugucuacacuugcugugcagaacauccgcucaccuguacagcaggcacagacaggcagucacaugacaacccagccu

SEQ ID NO: 195 - RNA, 22 nt, Homo sapiens
ugcaacuuaccugagucauuga

SEQ ID NO: 196 - RNA, 92 nt, Homo sapiens
guugucuccuuaauccuugcaacuuaccugagucauugauucaguaaaacauucaauggcacauguuuguuguuagggucaaaagagauaau

SEQ ID NO: 197 - RNA, 22 nt, Homo sapiens
uaggggcuccaggcaggggacc

SEQ ID NO: 198 - RNA, 97 nt, Homo sapiens
gggccugagugagcucauuucuaggggcuccaggcaggggaccaggaaugucauggugacugccuggauguggccccuagugaggcucuccuggccc

SEQ ID NO: 199 - RNA, 22 nt, Homo sapiens
uggcggccaggagaagacauau

SEQ ID NO: 200 - RNA, 118 nt, Homo sapiens
gaagaaggggaauggggagaauggcggccaggagaagacauaugacauuccccagggucaauggugcggcccgugugucuaucuacuggcccuccacuccuccugcgccacuuucuuc

SEQ ID NO: 201 - RNA, 22 nt, Homo sapiens
uaugccauggaaucaccuccag

SEQ ID NO: 202 - RNA, 68 nt, Homo sapiens
uuaucuaugccauggaaucaccuccagcuaguaagggcaggcuggaaaggauuccgugauacagauaa

SEQ ID NO: 203 - RNA, 22 nt, Homo sapiens
uaugguaagacugagugaauca

SEQ ID NO: 204 - RNA, 131 nt, Homo sapiens
cugcuugaugauuauucaauggaauugauauugauucacccagucuaagcuaccuuggcucuuuuuuaaguaucuaugguaagacugagugaaucaauaucaacuucuccagugaagccuuccucagguag

SEQ ID NO: 205 - RNA, 22 nt, Homo sapiens
uauucagaggcuuucugggcug

SEQ ID NO: 206 - RNA, 96 nt, Homo sapiens
acauuuuuuccuuguuccagagcuaagaaaccucugaauggagaggaaggugacucuauucagaggcuuucugggcugggagcaggauggcauugu

SEQ ID NO: 207 - RNA, 22 nt, Homo sapiens
ucagauaagauagcgucugccc

SEQ ID NO: 208 - RNA, 76 nt, Homo sapiens
gaagcauuggggagaagcaauuuuaucuaggagcaaguaggaacucucagauaagauagcgucugccccagucuuc

SEQ ID NO: 209 - RNA, 22 nt, Homo sapiens
uccaaggagaaaugggcaacag

SEQ ID NO: 210 - RNA, 83 nt, Homo sapiens
uuccuguccauuuguccauuauuauccuugagaggcuaacauguucuagucuccaaggagaaaugggcaacagggcaaaggga

SEQ ID NO: 211 - RNA, 22 nt, Homo sapiens
uccaguacauggggcaccgugg

SEQ ID NO: 212 - RNA, 74 nt, Homo sapiens
ucaggcucuccaguacauggggcaccguggggagcagcuguuccccugcuccagggucugcuggagagaccuga

SEQ ID NO: 213 - RNA, 22 nt, Homo sapiens
uccccagggccaguugagaggc

SEQ ID NO: 214 - RNA, 87 nt, Homo sapiens
gccucuccccagggccaguugagaggcacccccuagggacuucuuccccccggccaucuuccuccucgaaaggcccuggggcagggc

SEQ ID NO: 215 - RNA, 22 nt, Homo sapiens
uccuccuccccucuuuucccca

SEQ ID NO: 216 - RNA, 86 nt, Homo sapiens
gucccugggcuggggagaggggaggauuggggcgcgggaggcucuguucuccuccuccccucuuuuccccaccucccaaaauuggc

SEQ ID NO: 217 - RNA, 22 nt, Homo sapiens
ucuagguuuuuuuuuuuuuugg

SEQ ID NO: 218 - RNA, 72 nt, Homo sapiens
ucaugccaaagacagaugauuucuuggagaauguucagguaauucucuagguuuuuuuuuuuuuuggcauga

SEQ ID NO: 219 - RNA, 22 nt, Homo sapiens
ucuccauuacacuacccugccu

SEQ ID NO: 220 - RNA, 62 nt, Homo sapiens
cucucuccauuacacuacccugccucuucuccaugagaggcagcgggguguaguggauagag

SEQ ID NO: 221 - RNA, 22 nt, Homo sapiens
ucugagaaaggcaggagaucua

SEQ ID NO: 222 - RNA, 79 nt, Homo sapiens
cuccccuucucugagaaaggcaggagaucuagccccaucccuguguuagagcuccaccucccucagggccacuggggag

SEQ ID NO: 223 - RNA, 22 nt, Homo sapiens
ugaaaccaaguaugggucgccu

SEQ ID NO: 224 - RNA, 70 nt, Homo sapiens
gccucugaaaccaaguaugggucgccuucccguucugcaccaggucucacccacgcuugauuucaugggc

SEQ ID NO: 225 - RNA, 22 nt, Homo sapiens
ugagacagcccaggcucggcac

SEQ ID NO: 226 - RNA, 82 nt, Homo sapiens
ugaugucugagacagcccaggcucggcacugcagaauaaauuacaugauucgcugaaugccugggcuucgcucagacauaca

SEQ ID NO: 227 - RNA, 22 nt, Homo sapiens
ugagacuggggcgugaggcugu

SEQ ID NO: 228 - RNA, 78 nt, Homo sapiens
aucuccauacuucaccccccucaguuuccuccugcaucugcggucaguucugagacuggggcgugaggcugugggaau

SEQ ID NO: 229 - RNA, 22 nt, Homo sapiens
ugaggagccagggaagcaggug

SEQ ID NO: 230 - RNA, 72 nt, Homo sapiens
gauucugaggagccagggaagcagguggccccagagcuggggaguggccuccuuccugccgcucuuccccuc

SEQ ID NO: 231 - RNA, 22 nt, Homo sapiens
uggcuccuuaagguuuguacuc

SEQ ID NO: 232 - RNA, 63 nt, Homo sapiens
uggcuccuuaagguuuguacucccagagagccauguggaguugcaauaauacuuaaggaguua

SEQ ID NO: 233 - RNA, 22 nt, Homo sapiens
ugauggggguuggggcgauggc

SEQ ID NO: 234 - RNA, 108 nt, Homo sapiens
gguucucagcugaggcuguucugauggggguuggggcgauggcuucuaagagcugagcuucuuccauggcccucccugaauuccuagagaagcagccagcuguaagcc

SEQ ID NO: 235 - RNA, 22 nt, Homo sapiens
ugcgguaggugguuauuuuguu

SEQ ID NO: 236 - RNA, 102 nt, Homo sapiens
uucuguccuugcgguaggugguuauuuuguugagguucaugaguuucuuuauuucuugugggucuguucuaaacaagaaacugcacacacgcaaggacagag

SEQ ID NO: 237 - RNA, 22 nt, Homo sapiens
ugcuagaagguggggcagggau

SEQ ID NO: 238 - RNA, 66 nt, Homo sapiens
cucugcuagaagguggggcagggauucagcccccggugcugucccugacucucuuucugcguggag

SEQ ID NO: 239 - RNA, 22 nt, Homo sapiens
ugcguauucaggcaggaagaca

SEQ ID NO: 240 - RNA, 144 nt, Homo sapiens
gaugucaaaggugccgagaccuccuccacacgugccuggcuugccuucucccugaaugcugugggcacuugauucagucugcguauucaggcaggaagacagagaugggcugcgcgaggggguugaucugggagccuuugaauc

SEQ ID NO: 241 - RNA, 22 nt, Homo sapiens
uggagauagccccggguggggg

SEQ ID NO: 242 - RNA, 177 nt, Homo sapiens
ugguuucagcuggcccugcgggggacugccccaucuccccagggaggaaagagggucuggagauagccccgggugggggaggucaaccugcagaucccggcuuggggacagcuccagaugacaccucgugagccgccugggguggaggggcccccagugcagggcugcguggcccca

SEQ ID NO: 243 - RNA, 22 nt, Homo sapiens
uggccuugggucagagagggcu

SEQ ID NO: 244 - RNA, 77 nt, Homo sapiens
aguguugcauaggccugcugacccagggagagguuacgcaaacaucuggccuugggucagagagggcucugcaagcu

SEQ ID NO: 245 - RNA, 22 nt, Homo sapiens
acugauuucuuuugguguucag

SEQ ID NO: 246 - RNA, 64 nt, Homo sapiens
augacugauuucuuuugguguucagagucaauauaauuuucuagcaccaucugaaaucgguuau

SEQ ID NO: 247 - RNA, 22 nt, Homo sapiens
ugggcuggggcugagccugucg

SEQ ID NO: 248 - RNA, 89 nt, Homo sapiens
gagcaggugagugaugggcaucaacccccauccaggaagaugugaaugcuaucugggcuggggcugagccugucguaccaugccugcuu

SEQ ID NO: 249 - RNA, 22 nt, Homo sapiens
cccucgaggagcucacagucua

SEQ ID NO: 250 - RNA, 90 nt, Homo sapiens
uuuccugcccucgaggagcucacagucuaguaugucucauccccuacuagacugaagcuccuugaggacagggauggucauacucaccuc

SEQ ID NO: 251 - RNA, 22 nt, Homo sapiens
ugggaggugagucacuaaaaag

SEQ ID NO: 252 - RNA, 81 nt, Homo sapiens
ugcaggaagucugggaggugagucacuaaaaagcagccccaguucaaagugcugaugggacuugccucccgccccccugca

SEQ ID NO: 253 - RNA, 22 nt, Homo sapiens
uggggagggcugagccaaguac

SEQ ID NO: 254 - RNA, 85 nt, Homo sapiens
gcuugaagagucacuuggcucaugucuugauaucccagaaaucucaaaggcaucuggggagggcugagccaaguacuuuuucugc

SEQ ID NO: 255 - RNA, 21 nt, Homo sapiens
ugggggguaugagaguuggcu

SEQ ID NO: 256 - RNA, 68 nt, Homo sapiens
agaccgauucugaaguguccccucagcaagcugagguaaagucauucugggggguaugagaguuggcu

SEQ ID NO: 257 - RNA, 21 nt, Homo sapiens
ugggguuuugguggcggcugu

SEQ ID NO: 258 - RNA, 70 nt, Homo sapiens
acagccaaacccaaacuccagacccugcaccgccugggguaguuucuucugggguuuugguggcggcugu

SEQ ID NO: 259 - RNA, 22 nt, Homo sapiens
agaagacauuucagaauuucuu

SEQ ID NO: 260 - RNA, 100 nt, Homo sapiens
gugagguaaggaagaagacauuucagaauuucuuuuuucuucacucuugauucaucaaguacaggccugagagauucugaagaacuucaucaaaccugac

SEQ ID NO: 261 - RNA, 22 nt, Homo sapiens
uggugaggagugggacgagggc

SEQ ID NO: 262 - RNA, 141 nt, Homo sapiens
uccuuugcgaauacagcuucaguuccuaaccaaaaacacaucccugcuauugucuugucuggauccagaugcaaacaugauuaauuaaguuucuggugaggagugggacgagggcagugggaacugauggcuugcugagga

SEQ ID NO: 263 - RNA, 22 nt, Homo sapiens
ugguucuggggaaggggguugg

SEQ ID NO: 264 - RNA, 65 nt, Homo sapiens
ccugagcccucuucccuagugaucgggacugcugcaggaucugguucuggggaaggggguugggg

SEQ ID NO: 265 - RNA, 22 nt, Homo sapiens
uguaaagccaggcaauaagagg

SEQ ID NO: 266 - RNA, 122 nt, Homo sapiens
guguuagagguuaauaacacuguuauuuccucuauuaccuggauuuaauaaaagcaguggggcauaacauucuguaaagccaggcaauaagaggaaauaacacaaauguuaaccucuaacau

SEQ ID NO: 267 - RNA, 22 nt, Homo sapiens
agacaagcaaggggguugcuuu

SEQ ID NO: 268 - RNA, 81 nt, Homo sapiens
gagucucagaagacaagcaaggggguugcuuuugauugaucagucaaacacaauccccuucacaauugucuuuggagacuc

SEQ ID NO: 269 - RNA, 22 nt, Homo sapiens
uguuaucgcaugguaagcuuuc

SEQ ID NO: 270 - RNA, 76 nt, Homo sapiens
aguagucuguuaucgcaugguaagcuuucauucuacauagauuaaguaauggagcuuggaugugaagcaggcuauu

SEQ ID NO: 271 - RNA, 22 nt, Homo sapiens
uucagauguugggggccaugcu

SEQ ID NO: 272 - RNA, 78 nt, Homo sapiens
ggugagagcucggcucauagaauauuuguaagaaaauuaaagauuugcucuucagauguugggggccaugcucuuacc

SEQ ID NO: 273 - RNA, 22 nt, Homo sapiens
agacuguccuaggaggggcugc

SEQ ID NO: 274 - RNA, 131 nt, Homo sapiens
uuucccaagcucuucaugcagccucccugcccccacccucucaguguuguuuucccuuucucaaggggaagacuguccuaggaggggcugcggggcagagacagacugcaggaggaagaggaaaggggaga

SEQ ID NO: 275 - RNA, 22 nt, Homo sapiens
uucuaggcagagggacagcgga

SEQ ID NO: 276 - RNA, 114 nt, Homo sapiens
agggggcagauaggacaaaagaccccaucuucuaggcagagggacagcggaacaugaacagugacccaagcauucucugccuagaaguggcaucagcccagcccaucacucccu

SEQ ID NO: 277 - RNA, 22 nt, Homo sapiens
uucucaagagggaggcaaucau

SEQ ID NO: 278 - RNA, 82 nt, Homo sapiens
ucaugugguacucuucucaagagggaggcaaucauguguaauuagauaugauugacaccucugugaguggaguaacacauga

SEQ ID NO: 279 - RNA, 22 nt, Homo sapiens
uugcauauuauaugugccuuau

SEQ ID NO: 280 - RNA, 92 nt, Homo sapiens
gcccuuaugccuaggaucuugcauauuauaugugccuuauuaaugcuugcaauuguaagugcacuguaagugcaggaugagggcuacagggc

SEQ ID NO: 281 - RNA, 22 nt, Homo sapiens
uuguuuuauuugaggaacagac

SEQ ID NO: 282 - RNA, 62 nt, Homo sapiens
cucuuguuuuauuugaggaacagacagaugguuccacuguuguuuuccuugcaagacaaggg

SEQ ID NO: 283 - RNA, 21 nt, Homo sapiens
uuuaugcacagggggagauuc

SEQ ID NO: 284 - RNA, 75 nt, Homo sapiens
gaugucagccucugugaauugaagagcccaaguccaaaagggaaugaagcugucuuuaugcacagggggagauuc

SEQ ID NO: 285 - RNA, 22 nt, Homo sapiens
aaggaagggucuuaggggaucc

SEQ ID NO: 286 - RNA, 69 nt, Homo sapiens
gugaaggaagggucuuaggggauccuagcaaaaagaacagcacacaggauccccuagaccaucccccac

SEQ ID NO: 287 - RNA, 22 nt, Homo sapiens
aagggccaggggcaggcuggaa

SEQ ID NO: 288 - RNA, 73 nt, Homo sapiens
cuuacugaagggccaggggcaggcuggaaggcaggguccccaguccaguggcaccuuggcccucagcaguaag

SEQ ID NO: 289 - RNA, 22 nt, Homo sapiens
aaggguaaagugaugugcuagu

SEQ ID NO: 290 - RNA, 83 nt, Homo sapiens
cagaaguaaaugaaggguaaagugaugugcuagugugacugcagucugacuaauuugaaucuauuugcccuccaucauuucug

SEQ ID NO: 291 - RNA, 22 nt, Homo sapiens
aaucauagaggaaaauccgcau

SEQ ID NO: 292 - RNA, 71 nt, Homo sapiens
cuaaaagguggauguuccuucuaugcuuacaggauuuauggugaaucauagaggaaaauccgcauuuucag

SEQ ID NO: 293 - RNA, 22 nt, Homo sapiens
ugggaagggagagcccuuggcu

SEQ ID NO: 294 - RNA, 98 nt, Homo sapiens
ggcaaagagucacagugagaaugggaagggagagcccuuggcugugucacacacagggauccaguguccuuccuuuccauggaaguggcuuuugagcc

SEQ ID NO: 295 - RNA, 22 nt, Homo sapiens
agaguaaggaagagggagagaa

SEQ ID NO: 296 - RNA, 113 nt, Homo sapiens
cuaccuaacacugagagcucaauaauauuuuguucccuugcuccuucacucuuauuccuucuggaaagaagaguaaggaagagggagagaaacaguuugguauuuuuagguag

SEQ ID NO: 297 - RNA, 22 nt, Homo sapiens
auugaaaccucuaagaguggag

SEQ ID NO: 298 - RNA, 74 nt, Homo sapiens
gugguguccuacucaggagaguggcaaucacauguaauuaggugugauugaaaccucuaagaguggaguaacac

SEQ ID NO: 299 - RNA, 18 nt, Homo sapiens
aaugguacaguggacacc

SEQ ID NO: 300 - RNA, 71 nt, Homo sapiens
ggugucugacuuggccauucagacaauugcccccuugugggaaugcgggaaugaaugguacaguggacacc

SEQ ID NO: 301 - RNA, 22 nt, Homo sapiens
acagggaaucaggugucugcag

SEQ ID NO: 302 - RNA, 74 nt, Homo sapiens
gauccuggugggcaucaagaaguccugucaaacagaaaaagcacugacagggaaucaggugucugcagaugauc

SEQ ID NO: 303 - RNA, 22 nt, Homo sapiens
acauaguugucuuggugguaca

SEQ ID NO: 304 - RNA, 74 nt, Homo sapiens
uccuuggugacauaguugucuuggugguacagggaaacucccucuguaacacuggggguucugugucacaggga

SEQ ID NO: 305 - RNA, 22 nt, Homo sapiens
caacacaccuauucaaggauuc

SEQ ID NO: 306 - RNA, 65 nt, Homo sapiens
cuugaauccuuggaaccuaggugugagugcuauuucagugcaacacaccuauucaaggauucaaa

SEQ ID NO: 307 - RNA, 22 nt, Homo sapiens
agagguugggguggagguaucc

SEQ ID NO: 308 - RNA, 77 nt, Homo sapiens
guccaaggagaccaucccuagccuuaacccuucaguugcuagaucauugagagguugggguggagguauccugggau

SEQ ID NO: 309 - RNA, 22 nt, Homo sapiens
acuggcuuuggaaaagcuauau

SEQ ID NO: 310 - RNA, 70 nt, Homo sapiens
guuuguuugcuuuucucuaguugguaauguugguuaagacacugacuggcuuuggaaaagcuauauagau

SEQ ID NO: 311 - RNA, 22 nt, Homo sapiens
agcaggugagaggguauaaguu

SEQ ID NO: 312 - RNA, 128 nt, Homo sapiens
gggaagaaaugggaaaaucacuagauccaugucuuugagcaggugagaggguauaaguucuaaugcauaagcacuggcuuuauuaguucaucuguuuuaacaggaucaagauuuaucuuuguuuuccu

SEQ ID NO: 313 - RNA, 22 nt, Homo sapiens
agcaguauaucauuucauggag

SEQ ID NO: 314 - RNA, 81 nt, Homo sapiens
gucacacugagcaguauaucauuucauggaggaaaaaaaaaguuuuaccaugaaaaaugcuauguuguaucacagugugac

SEQ ID NO: 315 - RNA, 22 nt, Homo sapiens
agcauagaagagagagggggcc

SEQ ID NO: 316 - RNA, 90 nt, Homo sapiens
guuguaguuuuucagguuuucucucuugccuagcuccuguggauucacaucugagcauagaagagagagggggccauguaagaacuaaac

SEQ ID NO: 317 - RNA, 22 nt, Homo sapiens
agccauggcugagaguuuacag

SEQ ID NO: 318 - RNA, 80 nt, Homo sapiens
caaagucccugugaagcuggccauggcucagaugaaggcacaagaggugagccauggcugagaguuuacaggguauucug

SEQ ID NO: 319 - RNA, 22 nt, Homo sapiens
ugggcugagucguuuaaugugg

SEQ ID NO: 320 - RNA, 97 nt, Homo sapiens
gaaauucauuguuacugcaguuaauggccaguuuauuagagcguuaaccauccuuggcaaugggcugagucguuuaauguggguaacgaccaauuuc

SEQ ID NO: 321 - RNA, 22 nt, Homo sapiens
aggagcaggcugugugggccuc

SEQ ID NO: 322 - RNA, 70 nt, Homo sapiens
cucaugaggagcaggcugugugggccucagcacccuugggugcagagaccagcaaggccuggccucaggg

SEQ ID NO: 323 - RNA, 22 nt, Homo sapiens
aggcagguagcugggcuccagg

SEQ ID NO: 324 - RNA, 71 nt, Homo sapiens
agaaugaggcagguagcugggcuccaggaagcucacaugcuuuuaaagcuccaguuaaauagcuuuaagcu

SEQ ID NO: 325 - RNA, 22 nt, Homo sapiens
agggagggagcaggagagggaa

SEQ ID NO: 326 - RNA, 71 nt, Homo sapiens
agggagggagcaggagagggaaggaaaggccacgcaaucccagcccugcccccucccucucuccacucccu

SEQ ID NO: 327 - RNA, 22 nt, Homo sapiens
agggcggggaucccuggcuuug

SEQ ID NO: 328 - RNA, 80 nt, Homo sapiens
ggguccaggcugagggcggggaucccuggcuuugggaaacccuccucagacagggcuccccgcaccgcagcccuggcccc

SEQ ID NO: 329 - RNA, 22 nt, Homo sapiens
agggggagagggagcaaguugg

SEQ ID NO: 330 - RNA, 55 nt, Homo sapiens
agggggagagggagcaaguuggucaugcccuggacucugacccuucucucugauu

SEQ ID NO: 331 - RNA, 22 nt, Homo sapiens
augagcgggugccuggcgucga

SEQ ID NO: 332 - RNA, 72 nt, Homo sapiens
gcuccaauugggcuagcugcucuucacucccuccuggaagcugaugagcgggugccuggcgucgaauggggu

SEQ ID NO: 333 - RNA, 22 nt, Homo sapiens
aggggugcuggcggugacaugu

SEQ ID NO: 334 - RNA, 99 nt, Homo sapiens
aggcuauaauuccacugaggggugcuggcggugacauguaccaugaagucagaaucugagugguuugucaccagaacccccaggguagaauuauaggcu

SEQ ID NO: 335 - RNA, 22 nt, Homo sapiens
aggucagaggaggcuggggcac

SEQ ID NO: 336 - RNA, 138 nt, Homo sapiens
ggcugugggucaguaccuuaaaaaaguagcugaggucagaggaggcuggggcacaggaaaugguuguacaaugaucugcuacuuauaaaugccccaccucccacucacuguggcauuuuagagguucugccccacacc

SEQ ID NO: 337 - RNA, 22 nt, Homo sapiens
cguuuugggggcaucaucagac

SEQ ID NO: 338 - RNA, 116 nt, Homo sapiens
gugaaaagagauuuggcucaagugguuauggugccucuuuaaaugucagagucccugcugacuggcguuuugggggcaucaucagaccccugcccccaagccugaucuuuauuugc

SEQ ID NO: 339 - RNA, 22 nt, Homo sapiens
augagggugaggaagagagggg

SEQ ID NO: 340 - RNA, 136 nt, Homo sapiens
ggagaaagcagggucgcaugggcuucccagggccucucucuugguccccauccugucaccugcacagugagugaugagggugaggaagagaggggaccaggccaugcuggagauuguccugaguccugucuucucu

SEQ ID NO: 341 - RNA, 22 nt, Homo sapiens
augauacagguggagguagaaa

SEQ ID NO: 342 - RNA, 86 nt, Homo sapiens
guaaguuauauaugucuacuucuaccuguguuaucauaauaaaggugucaugaugauacagguggagguagaaauauauaacuuau

SEQ ID NO: 343 - RNA, 22 nt, Homo sapiens
gguccugggguaagagaggauc

SEQ ID NO: 344 - RNA, 66 nt, Homo sapiens
cugggguccugggguaagagaggaucuugggucuccugggcauuuucucccuucccaagaccugag

SEQ ID NO: 345 - RNA, 22 nt, Homo sapiens
auguggugggggagagguguca

SEQ ID NO: 346 - RNA, 113 nt, Homo sapiens
ggcauggggaugcuucagcagcugauguggugggggagaggugucaaugcccacagacaaggagggcccucuucccugcagccacggccagucugcagccuccccagaggguc

SEQ ID NO: 347 - RNA, 22 nt, Homo sapiens
auuuugaugaucaagcacguau

SEQ ID NO: 348 - RNA, 76 nt, Homo sapiens
uguuuccuaaacuugucugaucguagaacucacaguauuucaggugauuuugaugaucaagcacguauggggagca

SEQ ID NO: 349 - RNA, 22 nt, Homo sapiens
cagagcgugcugagcaagcgga

SEQ ID NO: 350 - RNA, 82 nt, Homo sapiens
ggccggcaugugccuucgcugcucagccugugccuugaacucgguggugcagagcgugcugagcaagcggacacugcaggcc

SEQ ID NO: 351 - RNA, 22 nt, Homo sapiens
caggggacguggaggagcagag

SEQ ID NO: 352 - RNA, 65 nt, Homo sapiens
cucugucuuccuuugcagucuccaugcuucauaggauguguugcaggggacguggaggagcagag

SEQ ID NO: 353 - RNA, 22 nt, Homo sapiens
cagggaguugggagguggcaag

SEQ ID NO: 354 - RNA, 120 nt, Homo sapiens
gugucagccucccugcccccuacccacauuucugcccccagugucccugcuucaggauggacaggaugcagggaguugggagguggcaagcugggugggguggagcggcgggcuagaggc

SEQ ID NO: 355 - RNA, 22 nt, Homo sapiens
caggggagggggaggaggcagu

SEQ ID NO: 356 - RNA, 107 nt, Homo sapiens
uuaccugucuacagcaccacuugcaggggagggggaggaggcaguucuuuaggaaggguagugcaaugcuuccuccucuucugcaagcagugcuggagauucuguag

SEQ ID NO: 357 - RNA, 22 nt, Homo sapiens
cagugacugagcguggggggug

SEQ ID NO: 358 - RNA, 80 nt, Homo sapiens
uggcugcugcagugacugagcguggggggugugugaucgaaggauacagacaguccccuuguuaucacucuggguugcua

SEQ ID NO: 359 - RNA, 22 nt, Homo sapiens
caugaccuucugggauuuguag

SEQ ID NO: 360 - RNA, 61 nt, Homo sapiens
accacaaaucccagaagucaccgcggccgcccccacugcaugaccuucugggauuuguagu

SEQ ID NO: 361 - RNA, 22 nt, Homo sapiens
ccagggccagauggaggauagg

SEQ ID NO: 362 - RNA, 73 nt, Homo sapiens
ggccuuuucucucucuuuuguuccugccuaacuucuuuugacauccugccagggccagauggaggauagggcc

SEQ ID NO: 363 - RNA, 22 nt, Homo sapiens
ccagucagugugggaugggcca

SEQ ID NO: 364 - RNA, 66 nt, Homo sapiens
ccugccagucagugugggaugggccagugggagaagagacugggcauccuccacugaccaggcagg

SEQ ID NO: 365 - RNA, 22 nt, Homo sapiens
ggugggaguccguagucaacca

SEQ ID NO: 366 - RNA, 61 nt, Homo sapiens
cugggagcugggaccucacccaugggucccccauggggugggaguccguagucaaccacag

SEQ ID NO: 367 - RNA, 22 nt, Homo sapiens
gguggggacgguagugugguug

SEQ ID NO: 368 - RNA, 55 nt, Homo sapiens
gguggggacgguagugugguugugcgcaugcgcaugggcaccuuauuguuuuccc

SEQ ID NO: 369 - RNA, 22 nt, Homo sapiens
ccuagggggccgggcagaagag

SEQ ID NO: 370 - RNA, 92 nt, Homo sapiens
gaccuuucugucaacuccauuucccugccuccugcacugcgaggcuaccuucuugccuagggggccgggcagaagagagaacugagagcguu

SEQ ID NO: 371 - RNA, 22 nt, Homo sapiens
ccucagcuguguucuugguauc

SEQ ID NO: 372 - RNA, 72 nt, Homo sapiens
ucaggugccucagcuguguucuugguaucacuguguaggaacagugugcagaggggacagugggaguccugg

SEQ ID NO: 373 - RNA, 22 nt, Homo sapiens
gguggguggaggugucuccagg

SEQ ID NO: 374 - RNA, 85 nt, Homo sapiens
gccucuuccugagacuuccgccagccccaggacccacagggcaggugacagagggguggguggaggugucuccaggagagcaggc

SEQ ID NO: 375 - RNA, 22 nt, Homo sapiens
ccugggugguggggcugggguu

SEQ ID NO: 376 - RNA, 82 nt, Homo sapiens
cugugccgggugccugggugguggggcugggguuuuauuuauaauauugauuuccugcuccacugccggggcucuggugaag

SEQ ID NO: 377 - RNA, 22 nt, Homo sapiens
cucaggcgggaaguaggcuggg

SEQ ID NO: 378 - RNA, 179 nt, Homo sapiens
ggcuaucccuggagcauaggaguaggauuuuaucccccagcuucggccuccccaggcagcacuuccuuucugugcuuugacuccaauuuggauggugcucaggcgggaaguaggcuggggugggaggaguuuaggggaauauuugucuucucuccuguuuugcccuagagauucuggcc

SEQ ID NO: 379 - RNA, 22 nt, Homo sapiens
cucaguuuccucagcugcaaaa

SEQ ID NO: 380 - RNA, 77 nt, Homo sapiens
acccaccugcaggcugagugacccugggcaaccuuuucccccucucucugcucaguuuccucagcugcaaaaugggu

SEQ ID NO: 381 - RNA, 18 nt, Homo sapiens
ggugugcugggagaaggg

SEQ ID NO: 382 - RNA, 67 nt, Homo sapiens
cccgguuuucccagcaccuccuccugcccuacucuucaguauuaauuggggugugcugggagaaggg

SEQ ID NO: 383 - RNA, 22 nt, Homo sapiens
cugacucacuucagaggggggc

SEQ ID NO: 384 - RNA, 97 nt, Homo sapiens
uggaccaacuaugucccccucagugcuucaguaaccuuagaaguuaagcaaacacagaaaugcugacucacuucagaggggggcauugugaagccca

SEQ ID NO: 385 - RNA, 22 nt, Homo sapiens
gguguguguggguggggagggu

SEQ ID NO: 386 - RNA, 106 nt, Homo sapiens
uuccucccucccuccgaguugaucucccuugagcuuugacacacgguaccuaaugaaggugggguguguguggguggggagggugauguggggguguagggaggag

SEQ ID NO: 387 - RNA, 22 nt, Homo sapiens
gagagggaaaggcuuuggaguc

SEQ ID NO: 388 - RNA, 62 nt, Homo sapiens
ggagagggaaaggcuuuggagucagucuuguccucuggacuuuuuccacuagccccuucucu

SEQ ID NO: 389 - RNA, 22 nt, Homo sapiens
ggacuggcagcagaggacagaa

SEQ ID NO: 390 - RNA, 66 nt, Homo sapiens
ugggacuggcagcagaggacagaauguguaaaggagagaaaaacaaacugugccucugcaguccua

SEQ ID NO: 391 - RNA, 22 nt, Homo sapiens
cuguccuaagguuguugaguug

SEQ ID NO: 392 - RNA, 67 nt, Homo sapiens
gcaugacucuucaaccucaggacuugcagaauuaauggaaugcuguccuaagguuguugaguugugc

SEQ ID NO: 393 - RNA, 22 nt, Homo sapiens
cuucuaaaccucuaggggugug

SEQ ID NO: 394 - RNA, 92 nt, Homo sapiens
uaucaugagauaaugacaccccaaguguguugugaggcauaagguucagcugagugcuucuaaaccucuaggggugugauuaucucaugaua

SEQ ID NO: 395 - RNA, 22 nt, Homo sapiens
cuucugggcugggcuggggccu

SEQ ID NO: 396 - RNA, 69 nt, Homo sapiens
uaccuaccugagacccgguccaggagugucuaaggacacccagugcuucugggcugggcuggggccuag

SEQ ID NO: 397 - RNA, 22 nt, Homo sapiens
cuugcaaauuaugggaccaggg

SEQ ID NO: 398 - RNA, 76 nt, Homo sapiens
cagucccuggguacuauaauuugcauugcaauaugaggcuuccauuuaaugcuugcaaauuaugggaccagggcug

SEQ ID NO: 399 - RNA, 22 nt, Homo sapiens
gaaagaugaagauguuuaagga

SEQ ID NO: 400 - RNA, 102 nt, Homo sapiens
gguagguccguggaggaauucuaagcauccaucucuucuucaccuuucagugaggguggaaagaugaagauguuuaaggauuggagguuugcagagccuacc

SEQ ID NO: 401 - RNA, 22 nt, Homo sapiens
gguuuccuggaaaguucugugg

SEQ ID NO: 402 - RNA, 73 nt, Homo sapiens
gcuccccacagccuuaguggaagcccugauauuuuaauagggcagggguuuccuggaaaguucuguggguggc

SEQ ID NO: 403 - RNA, 22 nt, Homo sapiens
gacauuagagcuaaguuuuuag

SEQ ID NO: 404 - RNA, 85 nt, Homo sapiens
aaagaaugaucuugaaaacauuggcuucuaaaagucugcuugauaguaguguggacauuagagcuaaguuuuuagauuguucuuu

SEQ ID NO: 405 - RNA, 16 nt, Homo sapiens
gagcaccacuggggua

SEQ ID NO: 406 - RNA, 75 nt, Homo sapiens
ugcuccaguaaggucuccaggacugcccaggccacaugaaggaggccagaggggcuauggagcaccacuggggua

SEQ ID NO: 407 - RNA, 22 nt, Homo sapiens
gaggaggugaagauuuuggggg

SEQ ID NO: 408 - RNA, 77 nt, Homo sapiens
agaggauggaggaggugaagauuuugggggguucucaucauuuucccuuuccaaguuucauccuuauccaugcuucu

SEQ ID NO: 409 - RNA, 22 nt, Homo sapiens
gaggcagagaagggacaggaaa

SEQ ID NO: 410 - RNA, 71 nt, Homo sapiens
ggaggcagagaagggacaggaaagaagguggccaaugacucuguggccuugcugugccuuugucugccucc

SEQ ID NO: 411 - RNA, 22 nt, Homo sapiens
gaggcaggugcgagaugagccc

SEQ ID NO: 412 - RNA, 78 nt, Homo sapiens
uggaggcaggugcgagaugagcccucugaagucuaaguugacaaggugguuuugggcacucaucuggcucugucucua

SEQ ID NO: 413 - RNA, 22 nt, Homo sapiens
gagguuccuuaggagggaguuc

SEQ ID NO: 414 - RNA, 70 nt, Homo sapiens
ggaaucaucucccuucuuggagucuccguguccuccuugggaauguggagguuccuuaggagggaguucc

SEQ ID NO: 415 - RNA, 22 nt, Homo sapiens
gcuggggugggcagcugugucu

SEQ ID NO: 416 - RNA, 79 nt, Homo sapiens
caugacuacccacacggcuugccuuccucuccagaugugaacucuggcuggggugggcagcugugucuguccuuucaug

SEQ ID NO: 417 - RNA, 22 nt, Homo sapiens
gcagaggguaggacggggaaag

SEQ ID NO: 418 - RNA, 74 nt, Homo sapiens
ccuuuggcuucucccuguuucuuccugcuacuuacaggccugguggcagaggguaggacggggaaagaaggagg

SEQ ID NO: 419 - RNA, 22 nt, Homo sapiens
gcaguaguuuacugaguggacu

SEQ ID NO: 420 - RNA, 80 nt, Homo sapiens
cucuggccauuuguuuaucuggugagaaacugcugugggagaccuguauggcaguaguuuacugaguggacuggcaagag

SEQ ID NO: 421 - RNA, 22 nt, Homo sapiens
gcgggugugcagaugaaggcug

SEQ ID NO: 422 - RNA, 67 nt, Homo sapiens
gguggcgggugugcagaugaaggcugaggccccaaggccccaccaucccaacugugugcuugccacc

SEQ ID NO: 423 - RNA, 22 nt, Homo sapiens
gcucagcgguggcagcagacga

SEQ ID NO: 424 - RNA, 78 nt, Homo sapiens
ggguugauuucuuguugccacugccuggccugaagacagugcuuggcucagcgguggcagcagacgaagcagcagcuc

SEQ ID NO: 425 - RNA, 22 nt, Homo sapiens
gcuuguuuucaaagguguagga

SEQ ID NO: 426 - RNA, 83 nt, Homo sapiens
uuccucccuucuguauaccuuuuaaaacaagccaaucggccgugcaugguggcuuguuuucaaagguguaggaaagggaggaa

SEQ ID NO: 427 - RNA, 22 nt, Homo sapiens
ugggggcaggauuugaccccag

SEQ ID NO: 428 - RNA, 85 nt, Homo sapiens
ggcccaggcaggugggggcaggauuugaccccagguagccuugcugcacagccuuggguuuaauccuauccaucuugccuggguc

SEQ ID NO: 429 - RNA, 22 nt, Homo sapiens
ggaauguuggcaggagaagaug

SEQ ID NO: 430 - RNA, 102 nt, Homo sapiens
uggaaugcuuacuuacuccugucaauuuccauccacaacugcuugacucugaaggugaguggugagcccucuugggaauguuggcaggagaagaugacucca

SEQ ID NO: 431 - RNA, 22 nt, Homo sapiens
ggaccccgggaagugcucagua

SEQ ID NO: 432 - RNA, 131 nt, Homo sapiens
ccucuuuguauucacguuucccaucuguaaaauugggcacugccuguggcacccauaccacugucgggagaauucaagcacugggaccccgggaagugcucaguauccauggaggacggauguaccagagg

SEQ ID NO: 433 - RNA, 22 nt, Homo sapiens
ucauuuuugugauguugcagcu

SEQ ID NO: 434 - RNA, 87 nt, Homo sapiens
agcgguggccagugucauuuuugugauguugcagcuaguaauaugagcccaguugcauagucacaaaagugaucauuggaaacugug

SEQ ID NO: 435 - RNA, 22 nt, Homo sapiens
ggaacggcuucauacaggaguu

SEQ ID NO: 436 - RNA, 93 nt, Homo sapiens
guagucaguaguuggggggugggaacggcuucauacaggaguugaugcacaguuauccagcuccuauaugaugccuuucuucauccccuucaa

SEQ ID NO: 437 - RNA, 22 nt, Homo sapiens
ggagagggcacaggcuuggcuc

SEQ ID NO: 438 - RNA, 66 nt, Homo sapiens
ggagagggcacaggcuuggcucucaaaaaggcuccauacaaaccgcugccugccugugcuccuccc

SEQ ID NO: 439 - RNA, 22 nt, Homo sapiens
ggagcaggagaccagggaggag

SEQ ID NO: 440 - RNA, 75 nt, Homo sapiens
gccgugggagcaggagaccagggaggagcagcguuuuccacggcacccucuucccgaggucccagcugacacagc

SEQ ID NO: 441 - RNA, 16 nt, Homo sapiens
ggagcugggauggaga

SEQ ID NO: 442 - RNA, 74 nt, Homo sapiens
uuuccaguccuaguuguuccacugcgagcaugguuagagugaggcauguuaaugaaugggagcugggauggaga

SEQ ID NO: 443 - RNA, 22 nt, Homo sapiens
uguauccaagcuuaacuaacug

SEQ ID NO: 444 - RNA, 90 nt, Homo sapiens
gauuaauugaguaccaguuaguuaaguuuggaugcauggaugcaucaccuuaaauguauccaagcuuaacuaacugguauucaauucauc

SEQ ID NO: 445 - RNA, 22 nt, Homo sapiens
ggagggcauucuuggguagaug

SEQ ID NO: 446 - RNA, 76 nt, Homo sapiens
agugcugggagggcauucuuggguagauguugaguggguuaccaaaggcauacuuugagaaaguguuuagagcauu

SEQ ID NO: 447 - RNA, 22 nt, Homo sapiens
ggauaaucacacuccuggggua

SEQ ID NO: 448 - RNA, 115 nt, Homo sapiens
gcaauuucaguggaugugguuaucaugggauaaucacacuccugggguacagccuugugccuguaaucucucaggaguguaauuauuucaugauaaccacacccccugguguugc

SEQ ID NO: 449 - RNA, 22 nt, Homo sapiens
ugggggguggggagaaugggca

SEQ ID NO: 450 - RNA, 80 nt, Homo sapiens
gcaaggggugggggguggggagaaugggcaugugacccaccacacuuguccuuuuucuuucccuccuccccacucucugc

SEQ ID NO: 451 - RNA, 22 nt, Homo sapiens
ggcuauagcaaaacuugauuua

SEQ ID NO: 452 - RNA, 76 nt, Homo sapiens
cccugaaguugucaaguuuugcuaccaauuugacacuuaaaugggcuauagcaaaacuugauuuaaacugaagagg

SEQ ID NO: 453 - RNA, 22 nt, Homo sapiens
ggcuguaaugcgaucccagaau

SEQ ID NO: 454 - RNA, 107 nt, Homo sapiens
gcuaccaccacuagaacguuaauucugggagugauguuacagcacuaaugauucagucuuuccugggcuguaaugcgaucccagaauuacugucuuauggugucagu

SEQ ID NO: 455 - RNA, 22 nt, Homo sapiens
gggaaugggcagaugagaauuu

SEQ ID NO: 456 - RNA, 75 nt, Homo sapiens
aacuauuuuuucucucuggacuuauucuuuacauuuuuagaaaaguggggaaugggcagaugagaauuuuuaguu

SEQ ID NO: 457 - RNA, 22 nt, Homo sapiens
gggcagagagcaagaaguauca

SEQ ID NO: 458 - RNA, 85 nt, Homo sapiens
aggauauguggggcagagagcaagaaguaucacccaucccugggacccagauacuauucuaugcuuuuuggaccccccguuuucu

SEQ ID NO: 459 - RNA, 22 nt, Homo sapiens
gggccagggacgucaccaacuu

SEQ ID NO: 460 - RNA, 83 nt, Homo sapiens
ccagcaggcguggggccagggacgucaccaacuuuaaagagugacugauaguuggcuucgucuuugaucccauagcuaaaugg

SEQ ID NO: 461 - RNA, 22 nt, Homo sapiens
gggcuguguuggggaccugagc

SEQ ID NO: 462 - RNA, 68 nt, Homo sapiens
uggggcuguguuggggaccugagcagagugcaacccagcaugucuggggccuccccaaccugacccca

SEQ ID NO: 463 - RNA, 22 nt, Homo sapiens
ggggaaugguggggcccucucu

SEQ ID NO: 464 - RNA, 116 nt, Homo sapiens
gccaaagcgugugucccucccuggagucaugggggaaugguggggcccucucuuuggcauaggaaggagacaggagggccugacuacucccccaggaggugugaaagcccuuuggu

SEQ ID NO: 465 - RNA, 22 nt, Homo sapiens
ggggaggggcaaacagguugga

SEQ ID NO: 466 - RNA, 79 nt, Homo sapiens
uuggaucugggggaggggcaaacagguuggagggggaggcuuccacuccaggcuguuguuucucuccuaaaguauccaa

SEQ ID NO: 467 - RNA, 22 nt, Homo sapiens
gaaagagaaguggacgaugagg

SEQ ID NO: 468 - RNA, 76 nt, Homo sapiens
auccagcuucuucauagugccacuuccuucaguagaaguacuagaagaaagagaaguggacgaugaggaaauggau

SEQ ID NO: 469 - RNA, 20 nt, Homo sapiens
gggggauggauagacagaca

SEQ ID NO: 470 - RNA, 58 nt, Homo sapiens
ugucugucuguccacacucaccagcccccugggcccuggggggauggauagacagaca

SEQ ID NO: 471 - RNA, 22 nt, Homo sapiens
uggguaauggaggcggugacug

SEQ ID NO: 472 - RNA, 78 nt, Homo sapiens
ggguggguaauggaggcggugacugagaaaacauuguuucucuauaugcagccaagucgccccuauagaacucaaccc

SEQ ID NO: 473 - RNA, 22 nt, Homo sapiens
gggguuagggggucagaguaag

SEQ ID NO: 474 - RNA, 66 nt, Homo sapiens
uggggguuagggggucagaguaagccuauggcuguauggcugcccuccuugacuccuacaccccca

SEQ ID NO: 475 - RNA, 22 nt, Homo sapiens
gggucugagggucccaggcuuc

SEQ ID NO: 476 - RNA, 111 nt, Homo sapiens
gggucuaaggauucuagauauaugaggguuggaggccugcgugucccaggaaucuaugaauuuggggucugagggucccaggcuucugugaguugagagucuaagagacuc

SEQ ID NO: 477 - RNA, 22 nt, Homo sapiens
ggguuggggguuggguccucuc

SEQ ID NO: 478 - RNA, 63 nt, Homo sapiens
aggggacgccuggcucucauugucauugguugcacaaugggguuggggguuggguccucuccu

SEQ ID NO: 479 - RNA, 22 nt, Homo sapiens
gguaggugagugaggguggggu

SEQ ID NO: 480 - RNA, 77 nt, Homo sapiens
ggggaaggguggguaggugagugaggguggggugccccugguuggccccccaucuucccugccugucccacaucccc

SEQ ID NO: 481 - RNA, 22 nt, Homo sapiens
ggucuggugggguuggagaggg

SEQ ID NO: 482 - RNA, 87 nt, Homo sapiens
gaguuucuaagcacaacccucuucgcccguggggccccagucaggucauccagaugggucuggugggguuggagagggugugugugu

SEQ ID NO: 483 - RNA, 22 nt, Homo sapiens
uggguggaacauguuucaugcu

SEQ ID NO: 484 - RNA, 101 nt, Homo sapiens
gcuguuuggagcucugcgguggguggaacauguuucaugcuggggugacggggcauuuucagcaaagcgugucuccccacuuuguguugaguuccuacggc

SEQ ID NO: 485 - RNA, 22 nt, Homo sapiens
ggugcagagugggcagcugguu

SEQ ID NO: 486 - RNA, 101 nt, Homo sapiens
agcgguggguguggcccuugggugcagagugggcagcugguuccagagauuuugcagccccgcugguugaucaccuguacccuauaaaaaugucuaccgcu

SEQ ID NO: 487 - RNA, 22 nt, Homo sapiens
gguggcugguacugacggaggg

SEQ ID NO: 488 - RNA, 113 nt, Homo sapiens
gcugggcguuuuuaauacaacgguggguggcugguacugacggaggggauuugggaucuccaccccuuccguuucccucacuauuccaggcccuguuuuggaaaugcuucagc

SEQ ID NO: 489 - RNA, 22 nt, Homo sapiens
gguggggugcagagaugggggu

SEQ ID NO: 490 - RNA, 138 nt, Homo sapiens
cugcucacgugggcacuuggcauguucaggcagguugacgucuccacucugcuccguccgcccagcaugucacugaguguggguggggugcagagaugggggugcagggugcaccugagcacuggccacccugggcag

SEQ ID NO: 491 - RNA, 22 nt, Homo sapiens
gguguggagugugacuguguug

SEQ ID NO: 492 - RNA, 136 nt, Homo sapiens
uaggacacaaccugggcgcugcaugugagacucucuggguguggagugugacuguguugugugggggugcgggaugugguauauacgcacacacgcagggagcgggguaugugugguuggagaggguugcguugug

SEQ ID NO: 493 - RNA, 22 nt, Homo sapiens
gguguggggaggggagggauag

SEQ ID NO: 494 - RNA, 80 nt, Homo sapiens
agcacucuuuccucuuccaccuccuccagccacagagccuagccaugccuggguguggggaggggagggauagauucgcu

SEQ ID NO: 495 - RNA, 22 nt, Homo sapiens
guauggagccugggggcaggga

SEQ ID NO: 496 - RNA, 73 nt, Homo sapiens
gacagucuccugcucuucagguucucccaguuggguucuagauugguauggagccugggggcagggauauguc

SEQ ID NO: 497 - RNA, 22 nt, Homo sapiens
guccaaucauuuauggccaggg

SEQ ID NO: 498 - RNA, 79 nt, Homo sapiens
cugucccuugguucaaaugacuugggccauccuggucaaguguucuucucugguccaaucauuuauggccaggggaugg

SEQ ID NO: 499 - RNA, 22 nt, Homo sapiens
gagugucauuuaagccuuuugc

SEQ ID NO: 500 - RNA, 60 nt, Homo sapiens
gagugucauuuaagccuuuugccccucuggacacuagaaggcagauggcgaaaugagcuu

SEQ ID NO: 501 - RNA, 22 nt, Homo sapiens
ugugugauugcaggagaugugg

SEQ ID NO: 502 - RNA, 57 nt, Homo sapiens
ugugugauugcaggagauguggcuguagacaaagccugccuccccaucaguuauaca

SEQ ID NO: 503 - RNA, 22 nt, Homo sapiens
uaggcagguggaggagugaagg

SEQ ID NO: 504 - RNA, 84 nt, Homo sapiens
ugggcuuuggagauguaggcagguggaggagugaaggcccaaggauggcucuucagcccuucccuguuuucaucagccagccua

SEQ ID NO: 505 - RNA, 22 nt, Homo sapiens
uaguagguugggguuugugcug

SEQ ID NO: 506 - RNA, 135 nt, Homo sapiens
gcugaaugaauggcuguauuauuaucaagguaauucaaaacaaauuucaagcugugacaauaaaaugguucuuguaguagguugggguuugugcugaaauugccaguuggaaugagaacaguuauguuuucaagc

SEQ ID NO: 507 - RNA, 22 nt, Homo sapiens
uaguuuucuaauuagggcuucc

SEQ ID NO: 508 - RNA, 67 nt, Homo sapiens
ggaagcuuugguuaagugaaaaagccuguugggguuuucccccuguaguuuucuaauuagggcuucc

SEQ ID NO: 509 - RNA, 22 nt, Homo sapiens
uauauuccagaggguagggccg

SEQ ID NO: 510 - RNA, 76 nt, Homo sapiens
gggguggccccccuuccccgguguacauauuguaucuauguaacguuuuguauauuccagaggguagggccgcccc

SEQ ID NO: 511 - RNA, 22 nt, Homo sapiens
uauauuccagaggguagggcug

SEQ ID NO: 512 - RNA, 121 nt, Homo sapiens
ccagcgagggcaugggcugcugggguggcccaccuuccccgguguacauacugugucuguguaacauuuuguauauuccagaggguagggcugccccuguaucauaccuagcagagguugg

SEQ ID NO: 513 - RNA, 22 nt, Homo sapiens
uaugaaaaucggagauugggua

SEQ ID NO: 514 - RNA, 94 nt, Homo sapiens
guggcuuaguguauuguaugaaaaucggagauuggguauuuuaagccaaaaauauucaacucugauuuuacauacguggauacuacuggccugc

SEQ ID NO: 515 - RNA, 22 nt, Homo sapiens
uaauugagaaugcaaucuacua

SEQ ID NO: 516 - RNA, 72 nt, Homo sapiens
cugcacuaauugagaaugcaaucuacuauggcaccuauuugcugauuuuuggagcauuuuuaauuuauguag

SEQ ID NO: 517 - RNA, 22 nt, Homo sapiens
uauuagguuggugcaaaaguca

SEQ ID NO: 518 - RNA, 79 nt, Homo sapiens
gaacaacuguauuagguuggugcaaaagucauugcagcacacaaugacuuuugcacuaagcuaaauauauagguuguuc

SEQ ID NO: 519 - RNA, 22 nt, Homo sapiens
ucaaagacacuuuggggaccac

SEQ ID NO: 520 - RNA, 70 nt, Homo sapiens
ugucaaagacacuuuggggaccaccguggaagaucauuuguggggaggucaucaggguggucuuuggaca

SEQ ID NO: 521 - RNA, 22 nt, Homo sapiens
ucagagaggagagggugcgggg

SEQ ID NO: 522 - RNA, 70 nt, Homo sapiens
cugucagagaggagagggugcggggugggggagccacuggaccacuccccgcucagcugcucucugacag

SEQ ID NO: 523 - RNA, 22 nt, Homo sapiens
ucagauguguccacagcuaauu

SEQ ID NO: 524 - RNA, 116 nt, Homo sapiens
acacuugcucaaauuaaugaccaaaaugucagauguguccacagcuaauuauucauuagaugcuuaauuagugugggaugaucaugacauuuuaauguuauuaauuuuuauacugu

SEQ ID NO: 525 - RNA, 22 nt, Homo sapiens
ucaggacuuuugaaagcuuaau

SEQ ID NO: 526 - RNA, 63 nt, Homo sapiens
ugauugagccgcagaaguguccuacaauuguuggcauugucaggacuuuugaaagcuuaauua

SEQ ID NO: 527 - RNA, 22 nt, Homo sapiens
ucaggcacagacaaugagugug

SEQ ID NO: 528 - RNA, 91 nt, Homo sapiens
aauaaguaacauaugaacacucaucaacugugccugacaugccaagugccacaugucaggcacagacaaugagugugcauaauuacuuauu

SEQ ID NO: 529 - RNA, 21 nt, Homo sapiens
ucagggaagaggaucuggccc

SEQ ID NO: 530 - RNA, 55 nt, Homo sapiens
gggccagaccucuucucagggaagaccgcgggugucagggaagaggaucuggccc

SEQ ID NO: 531 - RNA, 22 nt, Homo sapiens
ucaguggggccagggccauguu

SEQ ID NO: 532 - RNA, 98 nt, Homo sapiens
uuagaaugagauucaugugucaguggggccagggccauguuccaggcuaacuggaauuugugugugugcugguuucacuuuuauuguuucccagcuaa

SEQ ID NO: 533 - RNA, 22 nt, Homo sapiens
aaggggcauuuagggcaguaga

SEQ ID NO: 534 - RNA, 59 nt, Homo sapiens
aaggggcauuuagggcaguagauucuaagcugcuucacuaacugcacuagaugcaccuu

SEQ ID NO: 535 - RNA, 22 nt, Homo sapiens
ucauucuugcaucucugggguc

SEQ ID NO: 536 - RNA, 112 nt, Homo sapiens; identical to SEQ ID NO: 170

SEQ ID NO: 537 - RNA, 22 nt, Homo sapiens
uccaguaggaugaacucagaga

SEQ ID NO: 538 - RNA, 72 nt, Homo sapiens
uguccaguaggaugaacucagagaaccucacccgggccgcgguugccccugcugaauucguccuccugggca

SEQ ID NO: 539 - RNA, 22 nt, Homo sapiens
uccagaacuguucugggggugg

SEQ ID NO: 540 - RNA, 141 nt, Homo sapiens
gugcuuucacucuucccagaguccucccucaccacgucaccacccccagaacagcuuuaagacacugaaugccagcgcuaagccuuuguccagaacuguucugggggugggcuuuggagagggugggucagggucaugcac

SEQ ID NO: 541 - RNA, 22 nt, Homo sapiens
ucccauuggggcuguuuuaugc

SEQ ID NO: 542 - RNA, 74 nt, Homo sapiens
guauacauugcucaaaggagccccagugcuacugguuucuuaucugucccauuggggcuguuuuaugcuuauac

SEQ ID NO: 543 - RNA, 22 nt, Homo sapiens
uccccgaaucccagccuguuuu

SEQ ID NO: 544 - RNA, 121 nt, Homo sapiens
gggaagagaaacaggauggcuggguggauggguguguauucggggaucaaugggugggccucugaaaauaggccuguccccgaaucccagccuguuuuuuccaguuaacacuucucuuccu

SEQ ID NO: 545 - RNA, 22 nt, Homo sapiens
ucccuggagguaauuauugacc

SEQ ID NO: 546 - RNA, 89 nt, Homo sapiens
auauaaagauuuauugucccuggagguaauuauugaccucaacaucuuaucagucaauauuuaccucuuaggccaauaaaucuugauau

SEQ ID NO: 547 - RNA, 22 nt, Homo sapiens
uccuuuuucuuucccuccuccc

SEQ ID NO: 548 - RNA, 80 nt, Homo sapiens; identical to SEQ ID NO: 450

SEQ ID NO: 549 - RNA, 22 nt, Homo sapiens
ucucccguuuccuguguauggu

SEQ ID NO: 550 - RNA, 67 nt, Homo sapiens
uuuguucucccguuuccuguguaugguucagccccagugagccacaggagacagggccaggagcgga

SEQ ID NO: 551 - RNA, 22 nt, Homo sapiens
ucuagggcagaccugggcauug

SEQ ID NO: 552 - RNA, 76 nt, Homo sapiens
ggccugucuagggcagaccugggcauugcuggccucuaacagaugaggaaugccugggaccugcccaagacagguc

SEQ ID NO: 553 - RNA, 22 nt, Homo sapiens
ugagcaucuuaccggacagugc

SEQ ID NO: 554 - RNA, 90 nt, Homo sapiens
ccgggccccugugagcaucuuaccggacagugcuggauuucccagcuugacucuaacacugucugguaacgauguucaaaggugacccgc

SEQ ID NO: 555 - RNA, 22 nt, Homo sapiens
ucugacuuuggcaaguucuuca

SEQ ID NO: 556 - RNA, 149 nt, Homo sapiens
gugucaucuccgcuuggcagacaggaaaguagaggcucagagaggcucagggauuuggccaaagucagacugccacuaccuugaugucugacuuuggcaaguucuucaaacucucugccucugcauccuugcuuauaaaauggagacac

SEQ ID NO: 557 - RNA, 22 nt, Homo sapiens
ucuggcauccugggggcagugg

SEQ ID NO: 558 - RNA, 67 nt, Homo sapiens
caucagcugccucugcuaugacccggaaaugaagaugcuucugucuggcauccugggggcaguggug

SEQ ID NO: 559 - RNA, 22 nt, Homo sapiens
ucuguguuuucuuaccacugug

SEQ ID NO: 560 - RNA, 82 nt, Homo sapiens
auuuauuuuugucuguguuuucuuaccacugugguuucuccaccuaaagcaauggcugggacacacuaggcacaaaauaaau

SEQ ID NO: 561 - RNA, 22 nt, Homo sapiens
ucugugugugggagaggguggu

SEQ ID NO: 562 - RNA, 100 nt, Homo sapiens
gacuucccuuucuuucuccauucucuuccucacacugcagugucucaaagggugaaaaugucugugugugggagagggugguggugguagggcagugguc

SEQ ID NO: 563 - RNA, 22 nt, Homo sapiens
ucugggaucuguauuugggggg

SEQ ID NO: 564 - RNA, 81 nt, Homo sapiens
cauugcugagccuccugagcacaguccugggguuggaucauugcaaguucugggaucuguauuugggggguuccucuagug

SEQ ID NO: 565 - RNA, 22 nt, Homo sapiens
ugaaugcuggggcaauaggaug

SEQ ID NO: 566 - RNA, 96 nt, Homo sapiens
ugucuccaucugcuuucugugaaugcuggggcaauaggaugggcauggacuugaaauccuguuucucugccauuuacaguuaggugaaugugggca

SEQ ID NO: 567 - RNA, 22 nt, Homo sapiens
ugacacucauaccaggcauuga

SEQ ID NO: 568 - RNA, 91 nt, Homo sapiens
acuuaaaaguuaauacaaugcuugguaugaaugucacucaauuuuaaaucaugugacacucauaccaggcauugaauuaacuuuuuucugu

SEQ ID NO: 569 - RNA, 22 nt, Homo sapiens
ugacagguacagggacaaaucc

SEQ ID NO: 570 - RNA, 111 nt, Homo sapiens
acagaggcagauauuuucaaagcaaugugugacagguacagggacaaaucccguuaauaaguaagaggauuugugcuuggcucugucacaugccacuuugaaaaccuaccc

SEQ ID NO: 571 - RNA, 22 nt, Homo sapiens
ugaccagggaauuuuuauguag

SEQ ID NO: 572 - RNA, 90 nt, Homo sapiens
ugcuagucauuucugcuacacaaaaauccccuggucacuuuuuguuauuugugugaccagggaauuuuuauguagcagaaauagcuagua

SEQ ID NO: 573 - RNA, 22 nt, Homo sapiens
ugagcguggguuggggacuggg

SEQ ID NO: 574 - RNA, 55 nt, Homo sapiens
gugagcguggguuggggacugggugagaggucucccagauuccugccaugcuugc

SEQ ID NO: 575 - RNA, 22 nt, Homo sapiens
ugagcugggggugggcagaggc

SEQ ID NO: 576 - RNA, 85 nt, Homo sapiens
agccucgggguugugagcugggggugggcagaggcuaggucagcuuggucuggggcgcccgccuugagguuugcauucuggggcu

SEQ ID NO: 577 - RNA, 22 nt, Homo sapiens
ugaggggaguuggagggggaug

SEQ ID NO: 578 - RNA, 95 nt, Homo sapiens
agaaaugcaagcucucagauccuuguuccagagauucugacuuaguaagucugugugaggggaguuggagggggauggcugagauuugcauuucu

SEQ ID NO: 579 - RNA, 22 nt, Homo sapiens
ugagggugugcagugugcggug

SEQ ID NO: 580 - RNA, 80 nt, Homo sapiens
gcuuccccacgugcuguuucacucacaucuuuauccaggucuggcccuugugagggugugcagugugcgguguggggugc

SEQ ID NO: 581 - RNA, 22 nt, Homo sapiens
uggaaauuaugaggguaggagg

SEQ ID NO: 582 - RNA, 81 nt, Homo sapiens
ggggaggcucuguggaaauuaugaggguaggaggaggguuguaaagcucccuaaugcccuuaugguuacuacuguagcccc

SEQ ID NO: 583 - RNA, 22 nt, Homo sapiens
ugcugaggggcagagaucagac

SEQ ID NO: 584 - RNA, 77 nt, Homo sapiens
ccagcugugcugaggggcagagaucagacuauaaugagauuuguccacugguaucucuuccucuggguaucugcugg

SEQ ID NO: 585 - RNA, 22 nt, Homo sapiens
uggaaaagcauuaagaucauuu

SEQ ID NO: 586 - RNA, 69 nt, Homo sapiens
cuuguggaaaagcauuaagaucauuuuaccuuaaaaagaaggugaggugacuugaugacuaccacuaag

SEQ ID NO: 587 - RNA, 22 nt, Homo sapiens
gagggaggcagggcagaagugg

SEQ ID NO: 588 - RNA, 75 nt, Homo sapiens
ggagagggaggcagggcagaaguggcgggggugggggacaguccuuucaaacacugcagcucuguuuuucucucu

SEQ ID NO: 589 - RNA, 22 nt, Homo sapiens
uggagaugaaaggcagcuuccu

SEQ ID NO: 590 - RNA, 67 nt, Homo sapiens
ggauguggagaugaaaggcagcuuccugggacaaugaacaguccuggugaagcuguuggucuccaac

SEQ ID NO: 591 - RNA, 22 nt, Homo sapiens
uggagguuccuuaggagggagu

SEQ ID NO: 592 - RNA, 70 nt, Homo sapiens; identical to SEQ ID NO: 414

SEQ ID NO: 593 - RNA, 22 nt, Homo sapiens
uggauggagguugagagggcug

SEQ ID NO: 594 - RNA, 91 nt, Homo sapiens
agcugcauggaguucuguggauggagguugagagggcugcuucgaaaauaacucugcuuucucacucuccauucacccaugugccccagcu

SEQ ID NO: 595 - RNA, 22 nt, Homo sapiens
uggcaaggaguuggggaaaaaa

SEQ ID NO: 596 - RNA, 147 nt, Homo sapiens
cuggggccuaggcauuucccucgcuuuauguuuuugguuuuuuuucuuccuucaaucucuuugauuaggccguacguggcuguggcaaggaguuggggaaaaaaauuauaaaaacaggaaagagagaaagcacagccagagccccgg

SEQ ID NO: 597 - RNA, 22 nt, Homo sapiens
uggcgguggagagagggaaugu

SEQ ID NO: 598 - RNA, 69 nt, Homo sapiens
uguggcgguggagagagggaaugugggaugauaguucugcccugcguugucucuuucauaccguucacg

SEQ ID NO: 599 - RNA, 22 nt, Homo sapiens
ugggaggcagauuguugaguca

SEQ ID NO: 600 - RNA, 80 nt, Homo sapiens
ggccuuuuuauuugugggaggcagauuguugagucaaagaguacucuuuucucugaaauucacgcugucuuccccaggcc

SEQ ID NO: 601 - RNA, 22 nt, Homo sapiens
ugggcugggguugaugagaagg

SEQ ID NO: 602 - RNA, 64 nt, Homo sapiens
gugggcugggguugaugagaaggauugaacuucauuuaugaauccuuucuucagcuacgcccau

SEQ ID NO: 603 - RNA, 22 nt, Homo sapiens
uggggagaggaauugggaaggu

SEQ ID NO: 604 - RNA, 94 nt, Homo sapiens
gggguuccuagagagaauguggggagaggaauugggaagguugagucuaggcaacuuuugccaggaguuucacuccaaaggcuuucugagcuuc

SEQ ID NO: 605 - RNA, 22 nt, Homo sapiens
uggggaggugguguggcugucg

SEQ ID NO: 606 - RNA, 71 nt, Homo sapiens
cuguggggaggugguguggcugucgucuacacauagauguacucauuuuggccaaauugcuauccuugcag

SEQ ID NO: 607 - RNA, 22 nt, Homo sapiens
gagggguggaggaugggugagg

SEQ ID NO: 608 - RNA, 110 nt, Homo sapiens
gggggugucugcugcgggucgagagggguggaggaugggugaggaccaggaacgagggccuucucucaggacuccauccuucugaaaaugugcaccugcaguaagccccc

SEQ ID NO: 609 - RNA, 22 nt, Homo sapiens
cuggugagagaggugcccagga

SEQ ID NO: 610 - RNA, 113 nt, Homo sapiens
gcgcugugggacacuuacuuggcccucuccugcugggcgauuuccacuuguuuucgggcgaugcagggccuggugagagaggugcccaggagguagugguccucauacagugc

SEQ ID NO: 611 - RNA, 22 nt, Homo sapiens
gagggauugguggugguuguug

SEQ ID NO: 612 - RNA, 77 nt, Homo sapiens
gaacaggaggagggauugguggugguuguugaugaugaugauuauugcuaacuaugacuauuaugccuacccuguuc

SEQ ID NO: 613 - RNA, 20 nt, Homo sapiens
gagggguggggugaggaugg

SEQ ID NO: 614 - RNA, 56 nt, Homo sapiens
cuucccuuucugaccccuccuccccucacacugggagagggguggggugaggaugg

SEQ ID NO: 615 - RNA, 22 nt, Homo sapiens
uguaccuagguuauuguauucu

SEQ ID NO: 616 - RNA, 75 nt, Homo sapiens
uauggugcaugguauaauagccuaauacacagaauguacacuauguguaccuagguuauuguauucuguaccaua

SEQ ID NO: 617 - RNA, 22 nt, Homo sapiens
uguagaaucucaucugacguga

SEQ ID NO: 618 - RNA, 73 nt, Homo sapiens
ucuagucuguaagaagaggcugcacuggcagguuuugaccaaauuguguagaaucucaucugacgugauuggg

SEQ ID NO: 619 - RNA, 22 nt, Homo sapiens
uguagggguaggggaauggagc

SEQ ID NO: 620 - RNA, 71 nt, Homo sapiens
guguagggguaggggaauggagccaggaacugcucaguccugcaacgacaucccuuucccuuccuuuccac

SEQ ID NO: 621 - RNA, 22 nt, Homo sapiens
gagguaaagauggggagggcua

SEQ ID NO: 622 - RNA, 97 nt, Homo sapiens
gcacuccacuagcccucaccgcuacuccuuucauuucuccagccugggaaagguaguguuccgagagguaaagauggggagggcuaggaggaggugc

SEQ ID NO: 623 - RNA, 22 nt, Homo sapiens
gacagggcuggcgacaauucau

SEQ ID NO: 624 - RNA, 97 nt, Homo sapiens
aacuuugcacugaguguccucgcccuuccuuuagcuaauccuauacauuacagagaauuccuaggacagggcuggcgacaauucauguguaaauguu

SEQ ID NO: 625 - RNA, 22 nt, Homo sapiens
gaguuuggccggcagaggaagu

SEQ ID NO: 626 - RNA, 82 nt, Homo sapiens
gcccuguccccacaccuccugcuccccgacagccucagccagcuggaggaguuuggccggcagaggaaguggcacaagaggc

SEQ ID NO: 627 - RNA, 22 nt, Homo sapiens
ucacccccuagaccuuuaggcc

SEQ ID NO: 628 - RNA, 70 nt, Homo sapiens
ugcucacccccuagaccuuuaggccgaggccugccagccucuggaugacugugguguaggguggcaggca

SEQ ID NO: 629 - RNA, 22 nt, Homo sapiens
gagguugggguauguuuccgga

SEQ ID NO: 630 - RNA, 80 nt, Homo sapiens
gccuagauagauggaagcucaaaucccaauucugcagcuuccuggcugagagguugggguauguuuccggacuuucaggc

SEQ ID NO: 631 - RNA, 22 nt, Homo sapiens
ugugcuuugcuguggggcagug

SEQ ID NO: 632 - RNA, 97 nt, Homo sapiens
gcaaaugcucauucucucuguuccauaggaaaggcacuuggguuccaccugggucuaugugugugcuuugcuguggggcagugggaguggccacugc

SEQ ID NO: 633 - RNA, 22 nt, Homo sapiens
uguggggcuggggauaugacaa

SEQ ID NO: 634 - RNA, 110 nt, Homo sapiens
cucugcuccuaccauauguuuaugguuacuuccugggcaucuacacaagggccagucacuguguggggcuggggauaugacaacaaugagaacaacauccagguccagag

SEQ ID NO: 635 - RNA, 22 nt, Homo sapiens
uguguucguggccauguguuua

SEQ ID NO: 636 - RNA, 90 nt, Homo sapiens
gcugugcauuggugcaugcaugugugccauggaagcacaugcucacgugugcauguguguucguggccauguguuuacacugugugcagc

SEQ ID NO: 637 - RNA, 22 nt, Homo sapiens
uuaaguagaacccugcccauca

SEQ ID NO: 638 - RNA, 91 nt, Homo sapiens
guuaucuagcaucaugggcagaguucuacuuaacacuuguuuaaaaaaguucuaguuguuaaguagaacccugcccaucaugcuagauaac

SEQ ID NO: 639 - RNA, 22 nt, Homo sapiens
uuaauuaaaucuguauuuacau

SEQ ID NO: 640 - RNA, 96 nt, Homo sapiens
cugcuugcuauguaaauagagguuuaauuaacacuuaaaguuuugcaucuucacagguugcaaauguuaauuaaaucuguauuuacauggcaagag

SEQ ID NO: 641 - RNA, 22 nt, Homo sapiens
uuccggucuaucgugucaaugc

SEQ ID NO: 642 - RNA, 101 nt, Homo sapiens
gaggcccugccaauauccgcacaucacuggcaugauagaccauaacagcuucuucugagcuguuccggucuaucgugucaaugcguacucggggaguccuc

SEQ ID NO: 643 - RNA, 22 nt, Homo sapiens
uugagcuaacagggggcucuag

SEQ ID NO: 644 - RNA, 79 nt, Homo sapiens
guacuguuauguugagcuaacagggggcucuagaaacuuggcagauguuuagagcucucugguggccauauuaauagac

SEQ ID NO: 645 - RNA, 22 nt, Homo sapiens
uugcaagucaguagagagguac

SEQ ID NO: 646 - RNA, 88 nt, Homo sapiens
ugagcaccaaggguacgucuccaccgacuugcaacacaccaagacaaauguauguugcaagucaguagagagguaccccuggugcuca

SEQ ID NO: 647 - RNA, 22 nt, Homo sapiens
uugggggcugugaccagccaca

SEQ ID NO: 648 - RNA, 101 nt, Homo sapiens
uugugaggcugggggaggauguugggggcugugaccagccacaggggucccaugcagccuccggugcugggcacccccaggguuccucccucaccccagga

SEQ ID NO: 649 - RNA, 22 nt, Homo sapiens
uugguggcugcagagguuuucc

SEQ ID NO: 650 - RNA, 139 nt, Homo sapiens
guucagugguauugcaaagaggacagaugguuuuagggaggccuugugaaggaggcuguuuugcagauggagacacuguugguggcugcagagguuuuccagauccuguuuggcuuacugguuuuguagauugcugagc

SEQ ID NO: 651 - RNA, 22 nt, Homo sapiens
uuuuauuccuuuccuugggcua

SEQ ID NO: 652 - RNA, 80 nt, Homo sapiens
ggcaguuuguuuuauuccuuuccuugggcuaagagagaaauuguagcugcccccugagggaaggaauagaaugaaauguu

SEQ ID NO: 653 - RNA, 22 nt, Homo sapiens
uuucuucuucuauuuuccugga

SEQ ID NO: 654 - RNA, 80 nt, Homo sapiens
ggggguguuucuucuucuauuuuccuggaaaagcagaaagcaaggucucaggaagagugggagaauuuggggacagcccc

SEQ ID NO: 655 - RNA, 22 nt, Homo sapiens
uuugauaagcugacaugggaca

SEQ ID NO: 656 - RNA, 95 nt, Homo sapiens
aaagacaugcuguccacaguguguuugauaagcugacaugggacagggauucuuuucacuguugugucaguuuaucaaacccauacuuggaugac

SEQ ID NO: 657 - RNA, 22 nt, Homo sapiens
uuugguggggggugcacugauc

SEQ ID NO: 658 - RNA, 83 nt, Homo sapiens
ggggcugaggauuguuugguggggggugcacugaucaguucuuguccccuggugacugugccccuggccagcgaccuggccuc

SEQ ID NO: 659 - RNA, 22 nt, Homo sapiens
ugggggugagauauuuugcaua

SEQ ID NO: 660 - RNA, 104 nt, Homo sapiens
cauaauagcuauuugauugggggugagauauuuugcauauuggcuuggcgcugauagcggaauuucaucaacucccuuuuuucaugcuuuaaaacugaauuaug

SEQ ID NO: 661 - RNA, 22 nt, Homo sapiens
agggugggcuggcauggggcau

SEQ ID NO: 662 - RNA, 80 nt, Homo sapiens
ccaccccgccccugcuggcucaguccucugccccuugagguugaccucuuuagggugggcuggcauggggcaugggaugg

SEQ ID NO: 663 - RNA, 22 nt, Homo sapiens
aaggcaugggaagagaagucua

SEQ ID NO: 664 - RNA, 104 nt, Homo sapiens
acagcggagauccuuagcgggcuucacuuaucucauccuuccuucauacuggaguuaaggcaugggaagagaagucuauugaccacuccaggaucuagcccugu

SEQ ID NO: 665 - RNA, 22 nt, Homo sapiens
agucaggagccacguggaagag

SEQ ID NO: 666 - RNA, 91 nt, Homo sapiens
ucuucucuuucuucuuuuuccguuuuuggucuucaagauccucuagugacugaggagucaggagccacguggaagagggugggggagaaga

SEQ ID NO: 667 - RNA, 22 nt, Homo sapiens
uacaaccuccaggaggcaaaag

SEQ ID NO: 668 - RNA, 108 nt, Homo sapiens
ucuucuaagguccugcuauccuucuguggggaauguguccggaacccagucuccuaacacccaggauacaaccuccaggaggcaaaagcggggaaaaaccuuggaaga

SEQ ID NO: 669 - RNA, 22 nt, Homo sapiens
agucauguuuuauuguaaaugu

SEQ ID NO: 670 - RNA, 100 nt, Homo sapiens
ugguuucaggugaauuggauaugaacuguaaaaucugauuucuugucuucagacaguuagucauguuuuauuguaaauguccuugaucucuuuaaagcca

SEQ ID NO: 671 - RNA, 19 nt, Homo sapiens
cacagagacgucugacuuc

SEQ ID NO: 672 - RNA, 61 nt, Homo sapiens
ggagucaugcuucucugagguucagugugguuacuucuauuucacagagacgucugacuuc

SEQ ID NO: 673 - RNA, 22 nt, Homo sapiens
caggcauggugcugggugcugg

SEQ ID NO: 674 - RNA, 72 nt, Homo sapiens
ccuccucuagcauccucaugcccgacauugagcaacugugugcuucaggcauggugcugggugcuggggagg

SEQ ID NO: 675 - RNA, 22 nt, Homo sapiens
gaggccacaaggguaucauuua

SEQ ID NO: 676 - RNA, 82 nt, Homo sapiens
aauucuuugaggccacaaggguaucauuuauuaaaugacugcugcaguccucuaaaugggccccuuuugaccugaaagaguu

SEQ ID NO: 677 - RNA, 22 nt, Homo sapiens
gcuacacaucaucaaacagcgg

SEQ ID NO: 678 - RNA, 67 nt, Homo sapiens
uuguuacuauuuggauguuagccucaguccauaaagggacuugcuacacaucaucaaacagcggcaa

SEQ ID NO: 679 - RNA, 22 nt, Homo sapiens
ggauucauacagugauuucaug

SEQ ID NO: 680 - RNA, 59 nt, Homo sapiens
ggauucauacagugauuucaugguguuauguguugugaaacauugcacuguaugaaucu

SEQ ID NO: 681 - RNA, 22 nt, Homo sapiens
uaccuaugcacaauagggugca

SEQ ID NO: 682 - RNA, 111 nt, Homo sapiens
cugaaaugcaccauaugcgcucugauaccuaugcacaauagggugcagguuuaaugacuuucuuauugugccccuguuguaauuagguauuaaaggacauaugguaugcug

SEQ ID NO: 683 - RNA, 22 nt, Homo sapiens
ggggacaggagggcgccggauc

SEQ ID NO: 684 - RNA, 68 nt, Homo sapiens
ggggacaggagggcgccggaucuaugcgccccuuagcagcagaucgggauccuuuugccuccugcccc

SEQ ID NO: 685 - RNA, 22 nt, Homo sapiens
gguagggcacgggacuaaggga

SEQ ID NO: 686 - RNA, 59 nt, Homo sapiens
gguagggcacgggacuaagggagaccuggugacaguuguuccccgguccuggguucucu

SEQ ID NO: 687 - RNA, 22 nt, Homo sapiens
ggugagggggugggaggugugg

SEQ ID NO: 688 - RNA, 74 nt, Homo sapiens
ggugagggggugggaggugugguuuccaaagguuauaauuuucaugacauucuacacccaacccgcccccuucc

SEQ ID NO: 689 - RNA, 22 nt, Homo sapiens
gucugagauggaagacugugca

SEQ ID NO: 690 - RNA, 74 nt, Homo sapiens
cugcacugucuuccaucuaagucaucaccaauuuuauaucuaauaagcuuugucugagauggaagacugugcag

SEQ ID NO: 691 - RNA, 22 nt, Homo sapiens
uaaagagauggagagaggccau

SEQ ID NO: 692 - RNA, 69 nt, Homo sapiens
gauuuaaagagauggagagaggccauuuggcuggccccaaauuugaccuacuuuucccucucauaaauc

SEQ ID NO: 693 - RNA, 22 nt, Homo sapiens
uacuauucuaugcuuuuuggac

SEQ ID NO: 694 - RNA, 85 nt, Homo sapiens; identical to SEQ ID NO: 458

SEQ ID NO: 695 - RNA, 22 nt, Homo sapiens
uaccagggaaggcccugggaga

SEQ ID NO: 696 - RNA, 67 nt, Homo sapiens
guuuaccagggaaggcccugggagagaaucugcucagugacacucuuccuggggccucagagguggc

SEQ ID NO: 697 - RNA, 22 nt, Homo sapiens
cccugaacucaugggguggggg

SEQ ID NO: 698 - RNA, 68 nt, Homo sapiens
uucccauccuugccccgguacaauguguagagcugauacgcccugaacucauggggugggggugggga

SEQ ID NO: 699 - RNA, 22 nt, Homo sapiens
aggugcguuucuuggugguggc

SEQ ID NO: 700 - RNA, 97 nt, Homo sapiens
ggccauccaguagggguuucccaccaccguguagcgcuucuugcggucguucuugcgcaaggugcguuucuuggugguggccuucuccaugggggcc

SEQ ID NO: 701 - RNA, 22 nt, Homo sapiens
uagcauaauuaagucuuauguu

SEQ ID NO: 702 - RNA, 67 nt, Homo sapiens
uucuuuagcauaauuaagucuuauguugcagagaaaauugcaacuaauaugcgauuauguuuaggaa

SEQ ID NO: 703 - RNA, 22 nt, Homo sapiens
uauuuguaaggcagggccagua

SEQ ID NO: 704 - RNA, 67 nt, Homo sapiens
uucuuuauuuguaaggcagggccaguaaaaccauaaauauuacuggcucugcuuuacaaacagggaa

SEQ ID NO: 705 - RNA, 22 nt, Homo sapiens
ucaaaggauauugggggucaua

SEQ ID NO: 706 - RNA, 82 nt, Homo sapiens
cuaggucuaaugaugccauuuaucuuuugaagccaccacuaugaagggccauuucaaaggauauugggggucauaggccuag

SEQ ID NO: 707 - RNA, 22 nt, Homo sapiens
ucaaaucacugggguaccauuu

SEQ ID NO: 708 - RNA, 98 nt, Homo sapiens
gguguguuaaguguuucaaaucacugggguaccauuuuaugagccaaaagaacucauuuaccaaauggguccccagggccuggaauaacaaaugcacc

SEQ ID NO: 709 - RNA, 22 nt, Homo sapiens
ucagcaugcauaucauuaacua

SEQ ID NO: 710 - RNA, 111 nt, Homo sapiens
acuaaaaauaaauauugagcacuaguuaaugauauacaugcuuaaguauuuauagguuguuaacguuucagcaugcauaucauuaacuagaauuuaauauuuguuuacugu

SEQ ID NO: 711 - RNA, 22 nt, Homo sapiens
gggggaugugggggugaguuuc

SEQ ID NO: 712 - RNA, 62 nt, Homo sapiens
cggggggaugugggggugaguuucaaggguggggccuccgggauuugucccuguacccccug

SEQ ID NO: 713 - RNA, 22 nt, Homo sapiens
ucaugcucuggggcugaggccg

SEQ ID NO: 714 - RNA, 98 nt, Homo sapiens
gggugaguggggagggcuuucaugcucuggggcugaggccggggugucugauccuccugcuccagcccugggguugggagcucaacagccacuuccuc

SEQ ID NO: 715 - RNA, 22 nt, Homo sapiens
uccaugaucagcuguauuuggu

SEQ ID NO: 716 - RNA, 107 nt, Homo sapiens
gacgcaucuacuucccagcaguguugaggccuaauuucauuugauugaaaagccuuugggcuuuuuccaugaucagcuguauuugguuucagaaguucagaacuguc

SEQ ID NO: 717 - RNA, 22 nt, Homo sapiens
ucccaggaggcuucgcggugag

SEQ ID NO: 718 - RNA, 84 nt, Homo sapiens
uacuacauuucccaggaggcuucgcggugagccuccgcacucggcugguucucuuuaccgcgaggaaagcugggaaauguagug

SEQ ID NO: 719 - RNA, 22 nt, Homo sapiens
cacuggaccaagagucagaaga

SEQ ID NO: 720 - RNA, 111 nt, Homo sapiens
ucaguuugauggaaugagcacuggaccaagagucagaagaacuagggacucagaucaccucucccuuugauuucuucugugaccuugggccaguuaggugaucaucucuga

SEQ ID NO: 721 - RNA, 22 nt, Homo sapiens
ucccuuugugaggggaaaaaaa

SEQ ID NO: 722 - RNA, 72 nt, Homo sapiens
uuucccuuugugaggggaaaaaaacaauugcugagcugauaacaucaguuaauuuccucuggcagagggaga

SEQ ID NO: 723 - RNA, 22 nt, Homo sapiens
uccucuacaaaugucaccagca

SEQ ID NO: 724 - RNA, 66 nt, Homo sapiens
guuuuccucuacaaaugucaccagcagcugugucucauuuuguuggcaacauuuguuggggaaaac

SEQ ID NO: 725 - RNA, 22 nt, Homo sapiens
uccuucaaugggaaaagccagg

SEQ ID NO: 726 - RNA, 123 nt, Homo sapiens
gcacaaagucggagcaaugacaauuggaacuccauggcuauuccauugaaagucaauugaauuucaauuuccuucaaugggaaaagccaggaggaaccaauuauuguugcuuuaacauugugc

SEQ ID NO: 727 - RNA, 22 nt, Homo sapiens
uccuuuauuuggaccuggugcg

SEQ ID NO: 728 - RNA, 114 nt, Homo sapiens
gcggaugacucucgcccaacucacccucgcuggauuccgacaaagggaaauguauuuugguuuuuccuuuauuuggaccuggugcggggagacauuggguucugugacagcugc

SEQ ID NO: 729 - RNA, 22 nt, Homo sapiens
ucuauccucagcaucaugaaac

SEQ ID NO: 730 - RNA, 96 nt, Homo sapiens
acaucugaaacauuguuuucuauccucagcaucaugaaacccuaaacauacagguuucugucuugcugcuggggugggaaauuuggaucaguaugu

SEQ ID NO: 731 - RNA, 22 nt, Homo sapiens
ucucaaauacaccaggcauggc

SEQ ID NO: 732 - RNA, 175 nt, Homo sapiens
ccucacacccucccccuugcucgcucugcuucagccacaccaacucaucucuguuucucaaauacaccaggcauggccuagcuauuaaaugcacgguccagccuggugcauuugaagaacacggaugaauugguguggcuggaacagagugagugagggggagagcgggaggagg

SEQ ID NO: 733 - RNA, 22 nt, Homo sapiens
ucuugcuuccaacucucauuau

SEQ ID NO: 734 - RNA, 88 nt, Homo sapiens
gccgauguuaggaguugggagagauggaaagcaagauagagucacuuuauuucuugcuuccaacucucauuaugucuauuacacaggc

SEQ ID NO: 735 - RNA, 22 nt, Homo sapiens
ucuuggcagccucaguuucccc

SEQ ID NO: 736 - RNA, 73 nt, Homo sapiens
ggucuggauucuggggcuaacaggaggaucuggaaacagaaagucgguuucuuggcagccucaguuucccccc

SEQ ID NO: 737 - RNA, 22 nt, Homo sapiens
ucuucuggucuaaggucuucug

SEQ ID NO: 738 - RNA, 65 nt, Homo sapiens
uuuucuucuggucuaaggucuucuguuucccuguggaaucaggaagugccauagaugagugaaaa

SEQ ID NO: 739 - RNA, 22 nt, Homo sapiens
ugcuggcuuguucacaggggag

SEQ ID NO: 740 - RNA, 71 nt, Homo sapiens
gggaguuugcuggcuuguucacaggggaggggucagagauuaucucccuucuggaaaacucagcaaacccc

SEQ ID NO: 741 - RNA, 22 nt, Homo sapiens
ucuuucuuccuuucugcccucc

SEQ ID NO: 742 - RNA, 73 nt, Homo sapiens
ggggagguggcaggaagaggacagaaauaaaaacuuacacuacuuucuuucuuccuuucugcccucccucccu

SEQ ID NO: 743 - RNA, 22 nt, Homo sapiens
ugaagguugcggcagcuucggg

SEQ ID NO: 744 - RNA, 72 nt, Homo sapiens
uccuguuugaagguugcggcagcuucgggaaggagcucuccgacuccgggcugccuuugccuuuaaauuuga

SEQ ID NO: 745 - RNA, 22 nt, Homo sapiens
ugacaauaauaauagaugagug

SEQ ID NO: 746 - RNA, 74 nt, Homo sapiens
gcaguuuugacaauaauaauagaugaguguuuugugaaaauagguuacagguuuaucauuaauauuaaagcugc

SEQ ID NO: 747 - RNA, 22 nt, Homo sapiens
ugagaaaaaguggaaagaaggg

SEQ ID NO: 748 - RNA, 101 nt, Homo sapiens
aacacaggaagaaggggauuugagaaaaaguggaaagaagggacaucacacaaaggucccuuuauauugcauucuuucuucuuucucuuucuucaauuguu

SEQ ID NO: 749 - RNA, 22 nt, Homo sapiens
ugagggauuuuagacagaaggg

SEQ ID NO: 750 - RNA, 87 nt, Homo sapiens
gagugucuccuuugagggauuuuagacagaaggggcaggaagaggucagggccccuuucucuggagucacucagugagcggacauuc

SEQ ID NO: 751 - RNA, 22 nt, Homo sapiens
ugcuaucaagaaaucuaaugag

SEQ ID NO: 752 - RNA, 77 nt, Homo sapiens
gggagguuuugcuaucaagaaaucuaaugaggcuuaaagaaaacugauaauucauuagcauucuugaacgugccccc

SEQ ID NO: 753 - RNA, 20 nt, Homo sapiens
uggaauggggcuggggucgg

SEQ ID NO: 754 - RNA, 85 nt, Homo sapiens
ccaucccugagccccuuucuaaccaugcuguaccacacugcugaccauaucgugggauguccauuuggaauggggcuggggucgg

SEQ ID NO: 755 - RNA, 22 nt, Homo sapiens
uggagagggcugauagggagug

SEQ ID NO: 756 - RNA, 84 nt, Homo sapiens
uggagcccacccaucucaagggcagucccucccagauccugccuggauguuuggagagggcugauagggagugacauggcuccg

SEQ ID NO: 757 - RNA, 22 nt, Homo sapiens
uggaggagccagcggcuggcua

SEQ ID NO: 758 - RNA, 75 nt, Homo sapiens
ggauuuuggaggagccagcggcuggcuaucgagaagggaagggagcuagcacuugcugaguuucuucaaggggcc

SEQ ID NO: 759 - RNA, 22 nt, Homo sapiens
gaagcagguggggcuguuggga

SEQ ID NO: 760 - RNA, 84 nt, Homo sapiens
ggcuccugcuguccaggcuugggcccugcguguuuccggcaggggcagccaagaagcagguggggcuguugggacugcaggguc

SEQ ID NO: 761 - RNA, 22 nt, Homo sapiens
ugggcacagcggcaacaugaua

SEQ ID NO: 762 - RNA, 67 nt, Homo sapiens
uuuugggcacagcggcaacaugauaugacuuguuuuaaaaggaucacuggggccgcuauguugagaa

SEQ ID NO: 763 - RNA, 20 nt, Homo sapiens
uggggcugggagcaggagac

SEQ ID NO: 764 - RNA, 70 nt, Homo sapiens
gucucuaucccagagcuccagaaauauaugugcuauaaacugagcuaauuuggggcugggagcaggagac

SEQ ID NO: 765 - RNA, 22 nt, Homo sapiens
uggggggauaugauaucacaga

SEQ ID NO: 766 - RNA, 89 nt, Homo sapiens
guuucuguaguauaauauccccccaauauucccaugcccuauucccaagauuuugaggcauauuuggggggauaugauaucacagaaac

SEQ ID NO: 767 - RNA, 22 nt, Homo sapiens
uggggaagagggagcuggaaug

SEQ ID NO: 768 - RNA, 93 nt, Homo sapiens
ucagcaggcagauuuggggaagagggagcuggaaugauguacaugugaaucaucucaguugcuuucuuuuccugucugcucuucuucugcuga

SEQ ID NO: 769 - RNA, 22 nt, Homo sapiens
ugguaguuggggucggguuugu

SEQ ID NO: 770 - RNA, 71 nt, Homo sapiens
uguuugguaguuggggucggguuuguaguauugcagugugcuuuaacaagcaugggcuuugacaucagaca

SEQ ID NO: 771 - RNA, 22 nt, Homo sapiens
ugguggugccaggcuucugauu

SEQ ID NO: 772 - RNA, 90 nt, Homo sapiens
gagagaaaggaaugggagggggagcuaaugggcauugcugagguuggcaugaaguuuugguggugccaggcuucugauuuuuuuuuccuc

SEQ ID NO: 773 - RNA, 22 nt, Homo sapiens
gaaucucuacggguaagugugu

SEQ ID NO: 774 - RNA, 105 nt, Homo sapiens
augcuugaagaugucagacuguagaaucucuacggguaagugugugauuuccucagugacaucacauuugccugcagagauuuuccagucugccacuuugaaguu

SEQ ID NO: 775 - RNA, 22 nt, Homo sapiens
ugguuuuugguuuccagagcag

SEQ ID NO: 776 - RNA, 59 nt, Homo sapiens
ugguuuuugguuuccagagcaggcaggaguaaacacagcuucucugaagccauaaauca

SEQ ID NO: 777 - RNA, 22 nt, Homo sapiens
uugccacacugcaacaccuuac

SEQ ID NO: 778 - RNA, 63 nt, Homo sapiens
gucuggcuguuguggugugcaaaacuccguacauugcuauuuugccacacugcaacaccuuac

SEQ ID NO: 779 - RNA, 22 nt, Homo sapiens
uguggguuggggaaggaggaga

SEQ ID NO: 780 - RNA, 99 nt, Homo sapiens
aggagcucagggccuuuuucuuacccuccuuaccagcaguuuucuuguuuaguguuuuguggguuggggaaggaggagauuagggcugacuuagcucuu

SEQ ID NO: 781 - RNA, 22 nt, Homo sapiens
ggucauuguggagaggcacuua

SEQ ID NO: 782 - RNA, 55 nt, Homo sapiens
ggucauuguggagaggcacuuagauuuggugucagugcuucuguuaaugaugacu

SEQ ID NO: 783 - RNA, 22 nt, Homo sapiens
uguugagggcuaggcaaucuac

SEQ ID NO: 784 - RNA, 81 nt, Homo sapiens
guguuuugugugguaugccucguuuccaguaacccaguuaaauuaaagguuuguugagggcuaggcaaucuacauaaucac

SEQ ID NO: 785 - RNA, 22 nt, Homo sapiens
uguugaucucaagauuuacucc

SEQ ID NO: 786 - RNA, 111 nt, Homo sapiens
uuuuccuuuugcuuguauuuucauuuuguugaucucaagauuuacucccaucucaagauauguugagaugggagaauuugaaguuaaaauguagaaauauaaauuggaaaa

SEQ ID NO: 787 - RNA, 22 nt, Homo sapiens
uguuuuuuucagggggguugga

SEQ ID NO: 788 - RNA, 79 nt, Homo sapiens
gccuccgcuccgugacucacuggcaaagaucuugcugcauaggaucaguuuguuuuuuucagggggguuggaguggggc

SEQ ID NO: 789 - RNA, 22 nt, Homo sapiens
uuaaggugaaauugcuauguga

SEQ ID NO: 790 - RNA, 62 nt, Homo sapiens
uuuaaggugaaauugcuaugugaggauuuuguuaaccugacguuuugugguuucgccucaua

SEQ ID NO: 791 - RNA, 22 nt, Homo sapiens
  mRNA sequence
cugauuuuauuuuuuucacucc

SEQ ID NO: 792 - RNA, 90 nt, Homo sapiens
ucaaugguuguagagcugguuguggggaaaaugagauguucugggauuccagaacugauuuuauuuuuuucacuccaagcaccuaguuga

SEQ ID NO: 793 - RNA, 22 nt, Homo sapiens
uuauuccaggugcuuagcaaug

SEQ ID NO: 794 - RNA, 114 nt, Homo sapiens
agagcacuccuauguauaaagcacauuguuaaggaccuggaaaaaaaagcuaaauaagacugagauauuuuauuccaggugcuuagcaauguguuuuguguccaggaguauucu

SEQ ID NO: 795 - RNA, 22 nt, Homo sapiens
uucaaaagaaacugaaagcacc

SEQ ID NO: 796 - RNA, 67 nt, Homo sapiens; identical to SEQ ID NO: 66

SEQ ID NO: 797 - RNA, 22 nt, Homo sapiens
uucuggguggugauuuagucaa

SEQ ID NO: 798 - RNA, 80 nt, Homo sapiens
ugcauguggcuaaauuacaaacucagaggagcagcuuccaaauacgagaauuuucuggguggugauuuagucaacaugua

SEQ ID NO: 799 - RNA, 22 nt, Homo sapiens
uggcuguuguggugugcaaaac

SEQ ID NO: 800 - RNA, 63 nt, Homo sapiens; identical to SEQ ID NO: 778

SEQ ID NO: 801 - RNA, 22 nt, Homo sapiens
uugaacagggugggggaaugga

SEQ ID NO: 802 - RNA, 68 nt, Homo sapiens
accuuauucccuccacauuggucagcucaaggaauucccuuuugaacagggugggggaauggaaaggu

SEQ ID NO: 803 - RNA, 22 nt, Homo sapiens
uugcaagccuugggugugggag

SEQ ID NO: 804 - RNA, 111 nt, Homo sapiens
cacuggagagggaagagaaggcucgcuuuuuugcaagccuugggugugggaggguaauuaagaugccaacgguccuacacucaaggcauggaggagagaaagcaagucggg

SEQ ID NO: 805 - RNA, 22 nt, Homo sapiens
uugcuaagggugaugauggggc

SEQ ID NO: 806 - RNA, 96 nt, Homo sapiens
cacuuacuucuuuguuaucccagaccacaguccuuugaaaagcugacauggcuuuuugcuaagggugaugauggggcugggauuagaaguauagug

SEQ ID NO: 807 - RNA, 22 nt, Homo sapiens
cuuacgagaccagagccggcag

SEQ ID NO: 808 - RNA, 77 nt, Homo sapiens
cugcugccugccgccucuguuauuauaaguuggcagcagggcauggaaacuuacgagaccagagccggcaggcagag

SEQ ID NO: 809 - RNA, 22 nt, Homo sapiens
uuuagaauuggcugagaauuau

SEQ ID NO: 810 - RNA, 67 nt, Homo sapiens
uaaauaauuccuaggcaauauuuagaauggcugcaagccauuuuuagaauuggcugagaauuauuua

SEQ ID NO: 811 - RNA, 22 nt, Homo sapiens
uuuaucuuuuucuccagaugcc

SEQ ID NO: 812 - RNA, 75 nt, Homo sapiens
ucccacagucgggaggaaaagaaagaagacucuguuguucauuguuuuuaucuuuuucuccagaugccuguggga

SEQ ID NO: 813 - RNA, 19 nt, Homo sapiens
uuuauucagguggcaggca

SEQ ID NO: 814 - RNA, 79 nt, Homo sapiens
ugcccugcugccuggauggaaagcagcauucucuuuagcggcaaucugcuguaaucauuuuuuauucagguggcaggca

SEQ ID NO: 815 - RNA, 22 nt, Homo sapiens
uggaguggggucaggggagggc

SEQ ID NO: 816 - RNA, 67 nt, Homo sapiens
ggguggaguggggucaggggagggcucagggaucuguauccugccucuucuugggccuccugcaccc

SEQ ID NO: 817 - RNA, 22 nt, Homo sapiens
uggggucaggugugugcacagg

SEQ ID NO: 818 - RNA, 71 nt, Homo sapiens
ggguggggucaggugugugcacagguggcccagguuccccugcagccugcagccauugccuggcccugccu

SEQ ID NO: 819 - RNA, 22 nt, Homo sapiens
gggguggggggauguguuuguu

SEQ ID NO: 820 - RNA, 101 nt, Homo sapiens
agguaagagccauccaucacacgccucccguucccccacccagagaaauuaaagcugugcugggggguggggggauguguuuguuuuuuaauguuuugccu

SEQ ID NO: 821 - RNA, 22 nt, Homo sapiens
cugggccacuagcuuuaaacuu

SEQ ID NO: 822 - RNA, 80 nt, Homo sapiens
auaguuuguggcugggccacuagcuuuaaacuugaaaugaaguguccaguuuugaguuacuguguccaaccaccauuugu

SEQ ID NO: 823 - RNA, 20 nt, Homo sapiens
aauugcuugaacccaggaag

SEQ ID NO: 824 - RNA, 100 nt, Homo sapiens
gaggcaggagaauugcuugaacccaggaaguggaggcuucagugagcugagaacacgccacugcacuccaguccugggcaacagagcaagacucugucuc

SEQ ID NO: 825 - RNA, 21 nt, Homo sapiens
aaauggugcccuagugacuac

SEQ ID NO: 826 - RNA, 81 nt, Homo sapiens
gggcuuucaagucacuagugguuccguuuaguagaugauugugcauuguuucaaaauggugcccuagugacuacaaagccc

SEQ ID NO: 827 - RNA, 22 nt, Homo sapiens
gaaaagguauauggugggugga

SEQ ID NO: 828 - RNA, 98 nt, Homo sapiens
gccacaccuggguaggaagaaaagguauaugguggguggaaugaggagccacccugucccuccacuccuucccuaccuuuuuuuuuaacccuacuggc

SEQ ID NO: 829 - RNA, 22 nt, Homo sapiens
accacugaccguugacuguacc

SEQ ID NO: 830 - RNA, 110 nt, Homo sapiens
agaagggcuaucaggccagccuucagaggacuccaaggaacauucaacgcugucggugaguuugggauuugaaaaaaccacugaccguugacuguaccuugggguccuua

SEQ ID NO: 831 - RNA, 21 nt, Homo sapiens
aacaauauccuggugcugagu

SEQ ID NO: 832 - RNA, 67 nt, Homo sapiens; identical to SEQ ID NO: 192

SEQ ID NO: 833 - RNA, 22 nt, Homo sapiens
agaauuguggcuggacaucugu

SEQ ID NO: 834 - RNA, 97 nt, Homo sapiens
acucaggggcuucgccacugauuguccaaacgcaauucuuguacgagucugcggccaaccgagaauuguggcuggacaucuguggcugagcuccggg

SEQ ID NO: 835 - RNA, 22 nt, Homo sapiens
aaucauucacggacaacacuuu

SEQ ID NO: 836 - RNA, 76 nt, Homo sapiens
uacuugaagagaaguuguucgugguggauucgcuuuacuuaugacgaaucauucacggacaacacuuuuuucagua

SEQ ID NO: 837 - RNA, 22 nt, Homo sapiens
gaagguggaggugguguaguug

SEQ ID NO: 838 - RNA, 70 nt, Homo sapiens
gaagaagguggaggugguguaguugggccuguuuaggaacugauuacaucugagccucuggcccuuuuuc

SEQ ID NO: 839 - RNA, 17 nt, Homo sapiens
aaagcauaggugguuca

SEQ ID NO: 840 - RNA, 79 nt, Homo sapiens
auggaaaauuuuuuaacaucucuguaaaauuauuggguugaacaguauauuaaucaagaauaaagcauaggugguucau

SEQ ID NO: 841 - RNA, 24 nt, Homo sapiens
gugccuacugagcugaaacacagu

SEQ ID NO: 842 - RNA, 73 nt, Homo sapiens
cucugccucccgugccuacugagcugaaacacaguugguuuguguacacuggcucaguucagcaggaacaggg

SEQ ID NO: 843 - RNA, 24 nt, Homo sapiens
cugguuucacaugguggcuuagau

SEQ ID NO: 844 - RNA, 81 nt, Homo sapiens
cuucuggaagcugguuucacaugguggcuuagauuuuuccaucuuuguaucuagcaccauuugaaaucaguguuuuaggag

SEQ ID NO: 845 - RNA, 21 nt, Homo sapiens
aaucacuaacuccacugccau

SEQ ID NO: 846 - RNA, 84 nt, Homo sapiens
gugcucgguuuguaggcagugucauuagcugauuguacuguggugguuacaaucacuaacuccacugccaucaaaacaaggcac

SEQ ID NO: 847 - RNA, 20 nt, Homo sapiens
uaugucugcugaccaucacc

SEQ ID NO: 848 - RNA, 81 nt, Homo sapiens
ggguaaguggaaagauggugggccgcagaacaugugcugaguucgugccauaugucugcugaccaucaccuuuagaagccc

SEQ ID NO: 849 - RNA, 23 nt, Homo sapiens
aaggagcuuacaaucuagcuggg

SEQ ID NO: 850 - RNA, 93 nt, Homo sapiens
gguaacugcccucaaggagcuuacaaucuagcuggggguaaaugacuugcacaugaacacaacuagacugugagcuucuagagggcagggacc

SEQ ID NO: 851 - RNA, 17 nt, Homo sapiens
gaagacaggugcaauuu

SEQ ID NO: 852 - RNA, 70 nt, Homo sapiens
aaagaaaaccuuaguauuauuaaugaguuuaccauagaauuguuggaaauacugaagacaggugcaauuu

SEQ ID NO: 853 - RNA, 21 nt, Homo sapiens
caagcucgcuucuaugggucu

SEQ ID NO: 854 - RNA, 81 nt, Homo sapiens
cccauuggcauaaacccguagauccgaucuuguggugaaguggaccgcacaagcucgcuucuaugggucugugucagugug

SEQ ID NO: 855 - RNA, 25 nt, Homo sapiens
caccaccaggaguggagccugcggc

SEQ ID NO: 856 - RNA, 64 nt, Homo sapiens
gguugcaaagcugaaacuuaaaggaauugguggaagggcaccaccaggaguggagccugcggcu

SEQ ID NO: 857 - RNA, 25 nt, Homo sapiens
ugaccgauuucuccugguguucaga

SEQ ID NO: 858 - RNA, 88 nt, Homo sapiens
aucucuuacacaggcugaccgauuucuccugguguucagagucuguuuuugucuagcaccauuugaaaucgguuaugauguaggggga

SEQ ID NO: 859 - RNA, 22 nt, Homo sapiens
uuagggcccuggcuccaucucc

SEQ ID NO: 860 - RNA, 92 nt, Homo sapiens; identical to SEQ ID NO: 72

SEQ ID NO: 861 - RNA, 22 nt, Homo sapiens
cuccauuacacuacccugccuc

SEQ ID NO: 862 - RNA, 62 nt, Homo sapiens; identical to SEQ ID NO: 220

SEQ ID NO: 863 - RNA, 23 nt, Homo sapiens
aagccaggagagagugacaugac

SEQ ID NO: 864 - RNA, 163 nt, Homo sapiens
aggguaaagaaaggauccuaaaagcagcaagagaaaagaaacagauaacauacaauggagcuccaauacaucuggcaguauauuuuucaguggaaaccuuacaagccaggagagagugacaugacauauguuaaagugcugaagggaaaaaaccuuuuacccu

SEQ ID NO: 865 - RNA, 22 nt, Homo sapiens
uacccagagcaugcagugugaa

SEQ ID NO: 866 - RNA, 99 nt, Homo sapiens; identical to SEQ ID NO: 36

SEQ ID NO: 867 - RNA, 29 nt, Homo sapiens
acugugcuaaaauugcagacacuaggacc

SEQ ID NO: 868 - RNA, 105 nt, Homo sapiens
uuauuuuaccuucuuguauaagcacugugcuaaaauugcagacacuaggaccaugucuugguuuuugcaauaaugcuagcagaguacacacaagaagaaaaguaa

SEQ ID NO: 869 - RNA, 22 nt, Homo sapiens
cuuggcaccuagcaagcacuca

SEQ ID NO: 870 - RNA, 66 nt, Homo sapiens
cagugcuuggcaccuagcaagcacucaguaaauauuuguugagugccugcuaugugccaggcauug

SEQ ID NO: 871 - RNA, 22 nt, Homo sapiens
cacuagauugugagcuccugga

SEQ ID NO: 872 - RNA, 86 nt, Homo sapiens
gguccuugcccucaaggagcucacagucuauugaguuaccuuucugacuuucccacuagauugugagcuccuggagggcaggcacu

SEQ ID NO: 873 - RNA, 22 nt, Homo sapiens
aggggagagcuggaauuucuga

SEQ ID NO: 874 - RNA, 76 nt, Homo sapiens
agggaagaggggagagcuggaauuucugaggguuucgguugcaguuuucagugaucuuugcucgucucccuucccu

SEQ ID NO: 875 - RNA, 22 nt, Homo sapiens
uguguuccuuaaaggaugggca

SEQ ID NO: 876 - RNA, 79 nt, Homo sapiens
cugugccuggucccgcuugugagggaaggacauuagaaaaugaauugauguguuccuuaaaggaugggcaggaaaacag

SEQ ID NO: 877 - RNA, 22 nt, Homo sapiens
uugcgggugacgaucugcgggg

SEQ ID NO: 878 - RNA, 76 nt, Homo sapiens
gcugccuggguugcgggugacgaucugcggggucccgcacccggccccgcggagcccggacccgcacguaggcggc

SEQ ID NO: 879 - RNA, 22 nt, Homo sapiens
gaugagggaggugggucugaau

SEQ ID NO: 880 - RNA, 69 nt, Homo sapiens
agugaagaugagggaggugggucugaaugcauuucagaaguaugggcucuccucucucagacagacacu

SEQ ID NO: 881 - RNA, 22 nt, Homo sapiens
ugagggucugggcacuccuggg

SEQ ID NO: 882 - RNA, 75 nt, Homo sapiens
gaaugagggucugggcacuccuggggacagcugagugguaggacuccuggguccccagggggcagguccaucuuc

SEQ ID NO: 883 - RNA, 22 nt, Homo sapiens
cauaugcaaaggggaaggcuuu

SEQ ID NO: 884 - RNA, 66 nt, Homo sapiens
uaccauaugcaaaggggaaggcuuuacuucucuuuggaaacauagccuucccuguugcauacagua

SEQ ID NO: 885 - RNA, 22 nt, Homo sapiens
aaacauucgcggugcacuucuu

SEQ ID NO: 886 - RNA, 60 nt, Homo sapiens
gagaaguugcccguguuuuuuucgcuuuauuugugacgaaacauucgcggugcacuucuu

SEQ ID NO: 887 - RNA, 23 nt, Homo sapiens
aaccgagcugucuauauccuagc

SEQ ID NO: 888 - RNA, 85 nt, Homo sapiens
gcacuugauacuaaccgagcugucuauauccuagccuugugucaaaggcuugugauguguugugauagcuggguuuaagaagugc

SEQ ID NO: 889 - RNA, 22 nt, Homo sapiens
gaugguggcggccccagggagg

SEQ ID NO: 890 - RNA, 93 nt, Homo sapiens
guuggcacuagcuguacccaccuugccuggggcccccgugcugggggucgcccccaagaugguggcggccccagggaggacuguacugccagc

SEQ ID NO: 891 - RNA, 22 nt, Homo sapiens
aagaaggagcggcccuugugac

SEQ ID NO: 892 - RNA, 65 nt, Homo sapiens
cagaagaaggagcggcccuugugaccagugcccuuuugguucacaaggaacuucuccucuuguug

SEQ ID NO: 893 - RNA, 22 nt, Homo sapiens
gcaggagaaagcgcuaugguca

SEQ ID NO: 894 - RNA, 69 nt, Homo sapiens
caggcaggagaaagcgcuauggucauugcuggaagauuccuucugaccauuagcuaucucucugaccug

SEQ ID NO: 895 - RNA, 22 nt, Homo sapiens
uagaaauuaggagguuaucccc

SEQ ID NO: 896 - RNA, 67 nt, Homo sapiens
aauuagaaauuaggagguuaucccccaaauaggaauauuaauggguuugaguuucuaguuacuaguu

SEQ ID NO: 897 - RNA, 22 nt, Homo sapiens
ggaagcauccugagguguccau

SEQ ID NO: 898 - RNA, 77 nt, Homo sapiens
ccaugacuaugcacauccaggcuacuuccugacuaggcccuguucaggaagcauccugagguguccauuccucgugg

SEQ ID NO: 899 - RNA, 22 nt, Homo sapiens
gggcacugugacauguggcucc

SEQ ID NO: 900 - RNA, 92 nt, Homo sapiens
ugggagaaaucugagagccauguguuccacaggccucugguccuuguucaggcagcagggcacugugacauguggcuccuuggccccuucca

SEQ ID NO: 901 - RNA, 22 nt, Homo sapiens
gaggcaggagcauuucagaugg

SEQ ID NO: 902 - RNA, 83 nt, Homo sapiens
ucauguccuuuacuuuuuugcuccugucuccagacuuuuauaguaaguagaggcaggagcauuucagaugguaucagacaugg

SEQ ID NO: 903 - RNA, 22 nt, Homo sapiens
uggaucucuuggguaucggggu

SEQ ID NO: 904 - RNA, 67 nt, Homo sapiens
cccccgcccgaugaagaagaucccaggguaagucuagcccuggaucucuuggguaucgggguggggg

SEQ ID NO: 905 - RNA, 22 nt, Homo sapiens
gagguugaauuagauagauuca

SEQ ID NO: 906 - RNA, 101 nt, Homo sapiens
aaagacaaagucauaucugaaucuauuuaauucaaccucuauauauaaccagaucuaacuagagguugaauuagauagauucagguauguucuuuuucuuu

SEQ ID NO: 907 - RNA, 22 nt, Homo sapiens
gaguaacagcuuucaagauauu

SEQ ID NO: 908 - RNA, 95 nt, Homo sapiens
uguggugacguuccaaaauguuugaaagcuguugcccucaagaaacucuuguauauagaguaacagcuuucaagauauuuuuacauuagcccaca

SEQ ID NO: 909 - RNA, 22 nt, Homo sapiens
cgugggcgauguugcagggagc

SEQ ID NO: 910 - RNA, 70 nt, Homo sapiens
cucuugcucccgcccuccgcucaugcucacuguggccccaggacgugggcgauguugcagggagcaaggg

SEQ ID NO: 911 - RNA, 22 nt, Homo sapiens
ggcaggggcaggaccuucagag

SEQ ID NO: 912 - RNA, 93 nt, Homo sapiens
ggcugugugaggcaggggcaggaccuucagaguccucacagcuuugugaggcaaaagucugaguccaguccuggccucugccgcucacccacc

SEQ ID NO: 913 - RNA, 22 nt, Homo sapiens
gucuguuagggcggcugucuug

SEQ ID NO: 914 - RNA, 73 nt, Homo sapiens
gaacagagacagcuggccuggcggccucccucucacugcaugcaagagucuguuagggcggcugucuugcuuc

SEQ ID NO: 915 - RNA, 22 nt, Homo sapiens
uuuccacaggaugguggggggg

SEQ ID NO: 916 - RNA, 85 nt, Homo sapiens
ucccacaugaccagagcuucccauccuccaugcaugggaaucuacgaccaaacuuagauuuccacaggaugguggggggguggga

SEQ ID NO: 917 - RNA, 22 nt, Homo sapiens
gaguccuguauuuguggaugau

SEQ ID NO: 918 - RNA, 62 nt, Homo sapiens
gaguccuguauuuguggaugaugugagacuucuuauaguucugugagaugcagacuugacuc

SEQ ID NO: 919 - RNA, 22 nt, Homo sapiens
ugcauccuaucuccuguguguu

SEQ ID NO: 920 - RNA, 105 nt, Homo sapiens
aaaugcacucuaaauucuuugcacaucugggaggugguaugaguaauuuuucuaacuugcugcauccuaucuccuguguguuguaugaagugaaagacugcauuu

SEQ ID NO: 921 - RNA, 22 nt, Homo sapiens
agcuuacaaucuagcugggggu

SEQ ID NO: 922 - RNA, 89 nt, Homo sapiens
uaacugcccucaaggagcuuacaaucuagcuggggguaaaugacuugcacaugaacacaacuagacugugagcuucuagagggcaggga

SEQ ID NO: 923 - RNA, 20 nt, Homo sapiens
gaguagggcccaggcuaggg

SEQ ID NO: 924 - RNA, 57 nt, Homo sapiens
cucuggccuggggccugcucccuaucuguggaacugggaguagggcccaggcuaggg

SEQ ID NO: 925 - RNA, 22 nt, Homo sapiens
gguuuucccugagggaagguag

SEQ ID NO: 926 - RNA, 73 nt, Homo sapiens
ggguuuucccugagggaagguagcaucuugccauuuucuuccugcacagcuuugccuucccagggauccaccc

SEQ ID NO: 927 - RNA, 22 nt, Homo sapiens
gauuguguaaggguacaguugu

SEQ ID NO: 928 - RNA, 76 nt, Homo sapiens; identical to SEQ ID NO: 46

SEQ ID NO: 929 - RNA, 22 nt, Homo sapiens
uggccugguggugauucuccag

SEQ ID NO: 930 - RNA, 72 nt, Homo sapiens
gaucgaucuggccugguggugauucuccagaaacuccauuccucagggcugugaccaccaagccaggugauc

SEQ ID NO: 931 - RNA, 21 nt, Homo sapiens
uuuaaugaggcugggggugga

SEQ ID NO: 932 - RNA, 57 nt, Homo sapiens
uccacccccaagccucuugguaggaacugcaucauauuuaaugaggcugggggugga

SEQ ID NO: 933 - RNA, 21 nt, Homo sapiens
auugacaccucugugagugga

SEQ ID NO: 934 - RNA, 82 nt, Homo sapiens; identical to SEQ ID NO: 278

SEQ ID NO: 935 - RNA, 22 nt, Homo sapiens
cacaucugggaggugguaugag

SEQ ID NO: 936 - RNA, 105 nt, Homo sapiens; identical to SEQ ID NO: 920

SEQ ID NO: 937 - RNA, 22 nt, Homo sapiens
uaugcaacagggaaggcuaugu

SEQ ID NO: 938 - RNA, 66 nt, Homo sapiens
uacuguaugcaacagggaaggcuauguuuccaaagagaaguaaagccuuccccuuugcauauggua

SEQ ID NO: 939 - RNA, 22 nt, Homo sapiens
uggggucuuggagaggcagucc

SEQ ID NO: 940 - RNA, 81 nt, Homo sapiens
ggguccuggcuggggcuugaaugggguuccauggucuuggcuggaguguggggucuuggagaggcaguccagcuggggucu

SEQ ID NO: 941 - RNA, 22 nt, Homo sapiens
ugggugaggcauuuuauuuguu

SEQ ID NO: 942 - RNA, 100 nt, Homo sapiens
uaucucacagggaauugaugugggugaggcauuuuauuuguugcauuuguggaugcagggacaaauuagagccucccauuuuaucaccuuaauggagaua

SEQ ID NO: 943 - RNA, 22 nt, Homo sapiens
uaauuuccuggagggagucccg

SEQ ID NO: 944 - RNA, 102 nt, Homo sapiens
guucaacacgugaauucuugggaccccuuccaggggguuaaauccgggaaucucaauuuaauuuccuggagggagucccgagaaucugcauguggaaugaac

SEQ ID NO: 945 - RNA, 22 nt, Homo sapiens
auuagaccacaggagaguauua

SEQ ID NO: 946 - RNA, 97 nt, Homo sapiens
ucagcaaguaccuuaauuauauucccuacuggcucuaaucuucacacuugucagaaauuagaccacaggagaguauuagacauaggacaacugcuga

SEQ ID NO: 947 - RNA, 20 nt, Homo sapiens
caaaagacccacuauugugu

SEQ ID NO: 948 - RNA, 62 nt, Homo sapiens
acgcagugguagggaguugcuugccaagagugaacucugaaacaaaagacccacuauugugu

SEQ ID NO: 949 - RNA, 22 nt, Homo sapiens
uuuaccugauagauuaggaugg

SEQ ID NO: 950 - RNA, 71 nt, Homo sapiens
auggauauuuaccugauagauuaggaugguugacuuuagaguagucuugcucuauuaggcaaaugaucuau

SEQ ID NO: 951 - RNA, 22 nt, Homo sapiens
cagcagaaaaugugggugauuu

SEQ ID NO: 952 - RNA, 56 nt, Homo sapiens
cagcagaaaaugugggugauuucauuaucugggauugcuuugucauauuucugcug

SEQ ID NO: 953 - RNA, 22 nt, Homo sapiens
cauguggugguagcucagcucu

SEQ ID NO: 954 - RNA, 56 nt, Homo sapiens
cauguggugguagcucagcucuggccucccucuggcuucagcuggucugccacaug

SEQ ID NO: 955 - RNA, 22 nt, Homo sapiens
uucucugaguacaugcauuuuc

SEQ ID NO: 956 - RNA, 99 nt, Homo sapiens
gaagccaugagggaauucucugaguacaugcauuuucacacaucugcuaaugcaaaagccccgugugagcauuaguacucaggaaugugauguggauuc

SEQ ID NO: 957 - RNA, 21 nt, Homo sapiens
ugcuuggggguggaggagaag

SEQ ID NO: 958 - RNA, 59 nt, Homo sapiens
ccuucauccucccacuuccagaaaguucuuuuaaugacugcuuggggguggaggagaag

SEQ ID NO: 959 - RNA, 17 nt, Homo sapiens
gaccaagugagggcccc

SEQ ID NO: 960 - RNA, 57 nt, Homo sapiens
ggggccuuuggcuuuguccuggaaaaaaacaacagagaaggaccaagugagggcccc

SEQ ID NO: 961 - RNA, 20 nt, Homo sapiens
ggacaagugggagggacguc

SEQ ID NO: 962 - RNA, 57 nt, Homo sapiens
ggcguccuuccuuccuuccugacuccuuucuccuaagggacaagugggagggacguc

SEQ ID NO: 963 - RNA, 22 nt, Homo sapiens
ggaugaaaugggccgcagggaa

SEQ ID NO: 964 - RNA, 110 nt, Homo sapiens
ggagcugauaauguaaaccuuaacaacccgggcagggcccuuuucaucucccugaucacacucaucucaggaugaaaugggccgcagggaaggguucacaacucaacucu

SEQ ID NO: 965 - RNA, 22 nt, Homo sapiens
ucuguguauuguugcucagcuc

SEQ ID NO: 966 - RNA, 63 nt, Homo sapiens
caucuguguauuguugcucagcuccccacucaagcaauagguagagccucaaugacacagaug

SEQ ID NO: 967 - RNA, 19 nt, Homo sapiens
ucuggcugagaggcugauu

SEQ ID NO: 968 - RNA, 59 nt, Homo sapiens
aauuagucacagcuagagccugaaauuuaucacagaaaucucuggcugagaggcugauu

SEQ ID NO: 969 - RNA, 22 nt, Homo sapiens
cauuucagucucaauuuaaguu

SEQ ID NO: 970 - RNA, 58 nt, Homo sapiens
cauuucagucucaauuuaaguuuaauucccagguggaacuugaaaugaggcuguaaug

SEQ ID NO: 971 - RNA, 22 nt, Homo sapiens
uggagaugcacgagcaggugga

SEQ ID NO: 972 - RNA, 58 nt, Homo sapiens
uggagaugcacgagcagguggagcagcugaagcagagcauccaccgcgugcaccucua

SEQ ID NO: 973 - RNA, 22 nt, Homo sapiens
uccaugugggauuaggccugca

SEQ ID NO: 974 - RNA, 60 nt, Homo sapiens
uccaugugggauuaggccugcauuagcucuauuuguuaagggacuugauuucauugugga

SEQ ID NO: 975 - RNA, 22 nt, Homo sapiens
ucugaaauauuuggaaauagau

SEQ ID NO: 976 - RNA, 77 nt, Homo sapiens
ccauucaaucucaugcuccagaagucagaggauuccauacagucccuucugaaauauuuggaaauagauucugaugg

SEQ ID NO: 977 - RNA, 22 nt, Homo sapiens
uguugaaaucuaggcugugauu

SEQ ID NO: 978 - RNA, 55 nt, Homo sapiens
uguugaaaucuaggcugugauucaguggggucugauacagagccuagauucagca

SEQ ID NO: 979 - RNA, 22 nt, Homo sapiens
cgguggcauuguagugagugag

SEQ ID NO: 980 - RNA, 69 nt, Homo sapiens
cauuauuacucucaucugccacuguuuuuugaggaucugcagacgguggcauuguagugagugagaaug

SEQ ID NO: 981 - RNA, 22 nt, Homo sapiens
gacacaaccucaguguuuccag

SEQ ID NO: 982 - RNA, 89 nt, Homo sapiens
cuuauguucagugagacacaaccucaguguuuccaggugauuuuaagaacaccugauaaaacugagguauaguaccacuaaacuuuaag

SEQ ID NO: 983 - RNA, 22 nt, Homo sapiens
gggguuuucugugcuucuuccc

SEQ ID NO: 984 - RNA, 77 nt, Homo sapiens
cacuagagggguuuucugugcuucuuccccgauagaguaauguugguaggugcacuggauacccacuucuugaggug

SEQ ID NO: 985 - RNA, 19 nt, Homo sapiens
cgaaguccuggagcccggg

SEQ ID NO: 986 - RNA, 55 nt, Homo sapiens
cccgggacuccagcuaagacuaaucgccaauuaaggcgaaguccuggagcccggg

SEQ ID NO: 987 - RNA, 22 nt, Homo sapiens
guugacucagacagagagugag

SEQ ID NO: 988 - RNA, 59 nt, Homo sapiens
cuuugucuccucugagucaccuccaugguguggugggguugacucagacagagagugag

SEQ ID NO: 989 - RNA, 22 nt, Homo sapiens
uuugaaaauguggcagugggug

SEQ ID NO: 990 - RNA, 65 nt, Homo sapiens
auauuugaaaauguggcaguggguguugauggauuuuucuaaucacacugcacauuucuagauau

SEQ ID NO: 991 - RNA, 22 nt, Homo sapiens
uuugaggccacuagggaaccag

SEQ ID NO: 992 - RNA, 72 nt, Homo sapiens
uuugaggccacuagggaaccaguaaguguccugaaguaauaacuaacugaaugggacccuaguggccugaga

SEQ ID NO: 993 - RNA, 22 nt, Homo sapiens
uuuuaaugcucuucaauacuuu

SEQ ID NO: 994 - RNA, 108 nt, Homo sapiens
gaaagcuuggaaggaaaaggauuauuuuaaugcucuucaauacuuuaauuauaugacaguuguaguguagaaaugcaaaaguacucuuagguuuuccuucagguuuuc

SEQ ID NO: 995 - RNA, 17 nt, Homo sapiens
caccgcgugcaccucua

SEQ ID NO: 996 - RNA, 58 nt, Homo sapiens; identical to SEQ ID NO: 972

SEQ ID NO: 997 - RNA, 22 nt, Homo sapiens
ccucucaguuuaggagggccgu

SEQ ID NO: 998 - RNA, 58 nt, Homo sapiens
ccucucaguuuaggagggccguccuaagaauagggcuggcucuuaaaggcacgagagg

SEQ ID NO: 999 - RNA, 22 nt, Homo sapiens
ucauauauaguggcagcagggu

SEQ ID NO: 1000 - RNA, 64 nt, Homo sapiens
ucucauauauaguggcagcaggguucuguugucaacauaaccccuguagccaacuuggaugaga

SEQ ID NO: 1001 - RNA, 22 nt, Homo sapiens
ugagcugaagucauccacuaaa

SEQ ID NO: 1002 - RNA, 63 nt, Homo sapiens
ucugagcugaagucauccacuaaaaugaucuccuggaucaaguuggcaggaguucgguucagg

SEQ ID NO: 1003 - RNA, 22 nt, Homo sapiens
aagccgcgaggguggcuuagcu

SEQ ID NO: 1004 - RNA, 55 nt, Homo sapiens
aagccgcgaggguggcuuagcuucgguguuuuggcugagaacacccuuaaagcuu

SEQ ID NO: 1005 - RNA, 18 nt, Homo sapiens
gagaacgaucaguuaauu

SEQ ID NO: 1006 - RNA, 55 nt, Homo sapiens
gauugacugucucucguucuccagggacgaauuaauggagaacgaucaguuaauu

SEQ ID NO: 1007 - RNA, 22 nt, Homo sapiens
gcuuggggguaaggaguccuuc

SEQ ID NO: 1008 - RNA, 114 nt, Homo sapiens
gcagcaagcuauugaagaaggaaggaguccuguuccugccccugagcuacagcuaagguacaaggaauggcuuggggguaaggaguccuuccucaccagauaugguuuguaugu

SEQ ID NO: 1009 - RNA, 22 nt, Homo sapiens
ugagcauuaguacucaggaaug

SEQ ID NO: 1010 - RNA, 99 nt, Homo sapiens; identical to SEQ ID NO: 956

SEQ ID NO: 1011 - RNA, 22 nt, Homo sapiens
uucuaacccuggagggggcacu

SEQ ID NO: 1012 - RNA, 75 nt, Homo sapiens
cuguccuuguucuaacccuggagggggcacuugcugcgugugugugucauccuccuuccuagaaagaggggacag

SEQ ID NO: 1013 - RNA, 20 nt, Homo sapiens
ucagaugggcuuugggagcc

SEQ ID NO: 1014 - RNA, 57 nt, Homo sapiens
ggcucccaugacaaucauuucaagcagcuaaugaguuucagaugggcuuugggagcc

SEQ ID NO: 1015 - RNA, 22 nt, Homo sapiens
ugaaagcaggagauggggccaa

SEQ ID NO: 1016 - RNA, 55 nt, Homo sapiens
ugaaagcaggagauggggccaaaggggaacuuuuggccuccaguuuuugcuuuca

SEQ ID NO: 1017 - RNA, 22 nt, Homo sapiens
uguaugcccucaccgcucagcc

SEQ ID NO: 1018 - RNA, 73 nt, Homo sapiens
cccagggucuggugcggagagggcccacaguggacuuggugacgcuguaugcccucaccgcucagccccuggg

SEQ ID NO: 1019 - RNA, 22 nt, Homo sapiens
gcugagcggugagggcauacag

SEQ ID NO: 1020 - RNA, 73 nt, Homo sapiens
cccaggggcugagcggugagggcauacagcgucaccaaguccacugugggcccucuccgcaccagacccuggg

SEQ ID NO: 1021 - RNA, 22 nt, Homo sapiens
aucgacaacaaaucacagucug

SEQ ID NO: 1022 - RNA, 110 nt, Homo sapiens
uuggauguuggccuaguucuguguggaagacuagugauuuuguuguuuuuagauaacuaaaucgacaacaaaucacagucugccauauggcacaggccaugccucuacag

SEQ ID NO: 1023 - RNA, 22 nt, Homo sapiens
auggugcccuagugacuacaaa

SEQ ID NO: 1024 - RNA, 81 nt, Homo sapiens; identical to SEQ ID NO: 826

SEQ ID NO: 1025 - RNA, 22 nt, Homo sapiens
cuguacaaccuucuagcuuucc

SEQ ID NO: 1026 - RNA, 84 nt, Homo sapiens
gcauccggguugagguaguagguuguaugguuuagaguuacacccugggaguuaacuguacaaccuucuagcuuuccuuggagc

SEQ ID NO: 1027 - RNA, 22 nt, Homo sapiens
ugagggacuuucaggggcagcu

SEQ ID NO: 1028 - RNA, 111 nt, Homo sapiens
agaguguucaaggacagcaagaaaaaugagggacuuucaggggcagcuguguuuucugacucagucauaaugccccuaaaaauccuuauuguucuugcagugugcaucggg

SEQ ID NO: 1029 - RNA, 22 nt, Homo sapiens
ugagggacuuuugggggcagau

SEQ ID NO: 1030 - RNA, 87 nt, Homo sapiens
accgcagggaaaaugagggacuuuugggggcagauguguuuccauuccacuaucauaaugccccuaaaaauccuuauugcucuugca

SEQ ID NO: 1031 - RNA, 22 nt, Homo sapiens
aagcucgugucuguggguccgu

SEQ ID NO: 1032 - RNA, 70 nt, Homo sapiens
ggcacccacccguagaaccgaccuugcggggccuucgccgcacacaagcucgugucuguggguccguguc

SEQ ID NO: 1033 - RNA, 22 nt, Homo sapiens
caaauucguaucuaggggaaua

SEQ ID NO: 1034 - RNA, 110 nt, Homo sapiens
gaucugucugucuucuguauauacccuguagauccgaauuuguguaaggaauuuuguggucacaaauucguaucuaggggaauauguaguugacauaaacacuccgcucu

SEQ ID NO: 1035 - RNA, 22 nt, Homo sapiens
cagguugggaucgguugcaaug

SEQ ID NO: 1036 - RNA, 78 nt, Homo sapiens
cuuucuacacagguugggaucgguugcaaugcuguguuucuguaugguauugcacuugucccggccuguugaguuugg

SEQ ID NO: 1037 - RNA, 22 nt, Homo sapiens
aguggggcugcuguuaucuggg

SEQ ID NO: 1038 - RNA, 85 nt, Homo sapiens
ugguucccgcccccuguaacagcaacuccauguggaagugcccacugguuccaguggggcugcuguuaucuggggcgagggccag

SEQ ID NO: 1039 - RNA, 22 nt, Homo sapiens
cgugccuacugagcugaaacac

SEQ ID NO: 1040 - RNA, 73 nt, Homo sapiens; identical to SEQ ID NO: 842

SEQ ID NO: 1041 - RNA, 22 nt, Homo sapiens
uggccaucuuacugggcagcau

SEQ ID NO: 1042 - RNA, 95 nt, Homo sapiens
ccagcucgggcagccguggccaucuuacugggcagcauuggauggagucaggucucuaauacugccugguaaugaugacggcggagcccugcacg

SEQ ID NO: 1043 - RNA, 22 nt, Homo sapiens
uucagcuucuuuacagugcugc

SEQ ID NO: 1044 - RNA, 78 nt, Homo sapiens
uugugcuuucagcuucuuuacagugcugccuuguagcauucaggucaagcagcauuguacagggcuaugaaagaacca

SEQ ID NO: 1045 - RNA, 22 nt, Homo sapiens
accuuggcucuagacugcuuac

SEQ ID NO: 1046 - RNA, 110 nt, Homo sapiens
cggggcaccccgcccggacagcgcgccggcaccuuggcucuagacugcuuacugcccgggccgcccucaguaacagucuccagucacggccaccgacgccuggccccgcc

SEQ ID NO: 1047 - RNA, 19 nt, Homo sapiens
cgaggaggacggaaggugc

SEQ ID NO: 1048 - RNA, 67 nt, Homo sapiens
gccccuuccaguccuucucggaugaagcacaguugccgguuacgcuuccgaggaggacggaaggugc

SEQ ID NO: 1049 - RNA, 22 nt, Homo sapiens
agggcuuagcugcuugugagca

SEQ ID NO: 1050 - RNA, 78 nt, Homo sapiens
cugaggagcagggcuuagcugcuugugagcaggguccacaccaagucguguucacaguggcuaaguuccgccccccag

SEQ ID NO: 1051 - RNA, 22 nt, Homo sapiens
ugggauaucaucauauacugua

SEQ ID NO: 1052 - RNA, 86 nt, Homo sapiens
uggggcccuggcugggauaucaucauauacuguaaguuugcgaugagacacuacaguauagaugauguacuaguccgggcaccccc

SEQ ID NO: 1053 - RNA, 22 nt, Homo sapiens
ugggguuccuggggaugggauu

SEQ ID NO: 1054 - RNA, 73 nt, Homo sapiens
ggccggcugggguuccuggggaugggauuugcuuccugucacaaaucacauugccagggauuuccaaccgacc

SEQ ID NO: 1055 - RNA, 22 nt, Homo sapiens
gauuccuggaaauacuguucuu

SEQ ID NO: 1056 - RNA, 88 nt, Homo sapiens
caccuuguccucacgguccaguuuucccaggaaucccuuagaugcuaagauggggauuccuggaaauacuguucuugaggucaugguu

SEQ ID NO: 1057 - RNA, 22 nt, Homo sapiens
aaacaugguuccgucaagcacc

SEQ ID NO: 1058 - RNA, 110 nt, Homo sapiens
gugauaauguagcgagauuuucuguugugcuugaucuaaccaugugguugcgagguaugaguaaaacaugguuccgucaagcaccauggaacgucacgcagcuuucuaca

SEQ ID NO: 1059 - RNA, 22 nt, Homo sapiens
cugcauuaugagcacuuaaagu

SEQ ID NO: 1060 - RNA, 71 nt, Homo sapiens
guagcacuaaagugcuuauagugcagguaguguuuaguuaucuacugcauuaugagcacuuaaaguacugc

SEQ ID NO: 1061 - RNA, 22 nt, Homo sapiens
uaaagcaaugagacugauuguc

SEQ ID NO: 1062 - RNA, 95 nt, Homo sapiens
uuguaccuggugugauuauaaagcaaugagacugauugucauaugucguuugugggauccgucucaguuacuuuauagccauaccugguaucuua

SEQ ID NO: 1063 - RNA, 22 nt, Homo sapiens
acaagucaggcucuugggaccu

SEQ ID NO: 1064 - RNA, 89 nt, Homo sapiens
accagacuuuuccuagucccugagacccuaacuugugagguauuuuaguaacaucacaagucaggcucuugggaccuaggcggagggga

SEQ ID NO: 1065 - RNA, 22 nt, Homo sapiens
cagugguucuuaacaguucaac

SEQ ID NO: 1066 - RNA, 110 nt, Homo sapiens
guguuggggacucgcgcgcuggguccagugguucuuaacaguucaacaguucuguagcgcaauugugaaauguuuaggaccacuagacccggcgggcgcggcgacagcga

SEQ ID NO: 1067 - RNA, 22 nt, Homo sapiens
cguguucacagcggaccuugau

SEQ ID NO: 1068 - RNA, 109 nt, Homo sapiens
aucaagauuagaggcucugcucuccguguucacagcggaccuugauuuaaugucauacaauuaaggcacgcggugaaugccaagagcggagccuacggcugcacuugaa

SEQ ID NO: 1069 - RNA, 22 nt, Homo sapiens
uggcugccaauuccauagguca

SEQ ID NO: 1070 - RNA, 110 nt, Homo sapiens
gccgagaccgagugcacagggcucugaccuaugaauugacagccagugcucucgucuccccucuggcugccaauuccauaggucacagguauguucgccucaaugccagc

SEQ ID NO: 1071 - RNA, 22 nt, Homo sapiens
gguggggauuuguugcauuacu

SEQ ID NO: 1072 - RNA, 75 nt, Homo sapiens
ucaucccuggguggggauuuguugcauuacuuguguucuauauaaaguauugcacuugucccggccuguggaaga

SEQ ID NO: 1073 - RNA, 19 nt, Homo sapiens
gacuaaaaaagcuaugccu

SEQ ID NO: 1074 - RNA, 68 nt, Homo sapiens
aggcaacuuuuguagucuucagcaaggaaaccccccauuaaacaaauaagacuaaaaaagcuaugccu

SEQ ID NO: 1075 - RNA, 22 nt, Homo sapiens
uacucuggagagugacaaucau

SEQ ID NO: 1076 - RNA, 88 nt, Homo sapiens
guugucugugguacccuacucuggagagugacaaucauguauaacuaaauuugauugacacuucugugaguagaguaacgcaugacac

SEQ ID NO: 1077 - RNA, 22 nt, Homo sapiens
ucaaaacugaggggcauuuucu

SEQ ID NO: 1078 - RNA, 56 nt, Homo sapiens
cucaaaacugaggggcauuuucugugguuugaaaggaaagugcacccaguuuuggg

SEQ ID NO: 1079 - RNA, 22 nt, Homo sapiens
acacaacuagacugugagcuuc

SEQ ID NO: 1080 - RNA, 89 nt, Homo sapiens; identical to SEQ ID NO: 922

SEQ ID NO: 1081 - RNA, 22 nt, Homo sapiens
cccaccgggggaugaaugucac

SEQ ID NO: 1082 - RNA, 137 nt, Homo sapiens
guccccuccccuaggccacagccgaggucacaaucaacauucauuguugucgguggguugugaggacugaggccagacccaccgggggaugaaugucacuguggcugggccagacacggcuuaaggggaauggggac

SEQ ID NO: 1083 - RNA, 20 nt, Homo sapiens
uugggaacauuuugcaugua

SEQ ID NO: 1084 - RNA, 91 nt, Homo sapiens
aaacgauacuaaacuguuuuugcgauguguuccuaauaugcacuauaaauauauugggaacauuuugcauguauaguuuuguaucaauaua

SEQ ID NO: 1085 - RNA, 22 nt, Homo sapiens
aguucagcaggaacagggguca

SEQ ID NO: 1086 - RNA, 117 nt, Homo sapiens
gcugccuggccucccugggcucugccucccgugccuacugagcugaaacacaguugguuuguguacacuggcucaguucagcaggaacaggggucaagcccccuuggagccugcagc

SEQ ID NO: 1087 - RNA, 22 nt, Homo sapiens
uuguaguugaaauacaacgaug

SEQ ID NO: 1088 - RNA, 200 nt, Homo sapiens
ggggagaucaauaaaugagugguuaauuaauuuuauuaacgaguugguuuugcguguuggggucauuaguguucuuguaguugaaauacaacgaugguuuuucauaucauuggucgugguuguaguccgugcgagaauaaugacauaugcuuuauuuuuguuaagugugguuuuaguaaugggguuugugggguuuucuu

SEQ ID NO: 1089 - RNA, 22 nt, Homo sapiens
aauguguagcaaaagacagaau

SEQ ID NO: 1090 - RNA, 87 nt, Homo sapiens
caauagacacccaucgugucuuuugcucugcagucaguaaauauuuuuuugugaauguguagcaaaagacagaauggugguccauug

SEQ ID NO: 1091 - RNA, 22 nt, Homo sapiens
cuacacucaaggcauggaggag

SEQ ID NO: 1092 - RNA, 111 nt, Homo sapiens; identical to SEQ ID NO: 804

SEQ ID NO: 1093 - RNA, 22 nt, Homo sapiens
ucuuucccaacuuacuuuacuc

SEQ ID NO: 1094 - RNA, 111 nt, Homo sapiens
ccaguucaguuucaccacuuauauuuucucuuucccaacuuacuuuacucugaauaguauagguaggaggagggaaguuggguagggugguugggggugggaguggguugg

SEQ ID NO: 1095 - RNA, 22 nt, Homo sapiens
auuuggugggguuuuuuaaugu

SEQ ID NO: 1096 - RNA, 73 nt, Homo sapiens
uuguggcauuuggugggguuuuuuaauguggcuuuuuucaaagggucuuuaaaauaugccacugaagcagcaa

SEQ ID NO: 1097 - RNA, 22 nt, Homo sapiens
caaagcugaagggcaggaugug

SEQ ID NO: 1098 - RNA, 70 nt, Homo sapiens
ugagccaaagcugaagggcaggaugugguuucagcaugcggugaccaccaucccucccuccaguagcuca

SEQ ID NO: 1099 - RNA, 22 nt, Homo sapiens
guuucauggcuuguuaaguccc

SEQ ID NO: 1100 - RNA, 79 nt, Homo sapiens
uaugcuuggggcuggggaagccagaaaccaauccauuugaugucugugugguuucauggcuuguuaagucccuuucaua

SEQ ID NO: 1101 - RNA, 22 nt, Homo sapiens
gcccaaauggauaaauuuaucu

SEQ ID NO: 1102 - RNA, 78 nt, Homo sapiens
gaggcagauucacguuuguccauuuggaugcuuccuuuagaauugacaagcccaaauggauaaauuuaucuuggucuu

SEQ ID NO: 1103 - RNA, 22 nt, Homo sapiens
gcuggagaugagggcugcgcag

SEQ ID NO: 1104 - RNA, 74 nt, Homo sapiens
cccaccccucccgagccccaauucccuuuacauaaaacaugaagcuggagaugagggcugcgcagagggcaggg

SEQ ID NO: 1105 - RNA, 22 nt, Homo sapiens
gcugguuucauauggugguuua

SEQ ID NO: 1106 - RNA, 81 nt, Homo sapiens
cuucaggaagcugguuucauauggugguuuagauuuaaauagugauugucuagcaccauuugaaaucaguguucuuggggg

SEQ ID NO: 1107 - RNA, 22 nt, Homo sapiens
auuggugagucacaauauauua

SEQ ID NO: 1108 - RNA, 72 nt, Homo sapiens
gguacauuggugagucacaauauauuaugaguuguaccacaaguaauuugugacucaugaagcuaaaguacc

SEQ ID NO: 1109 - RNA, 22 nt, Homo sapiens
aacugguuguguuagaagcugc

SEQ ID NO: 1110 - RNA, 75 nt, Homo sapiens
gggagugaacugguuguguuagaagcugcucuacuuaaaaccaugugggggcuucugguacauucauucuuuccc

SEQ ID NO: 1111 - RNA, 22 nt, Homo sapiens
aagauacaauaugggugugugu

SEQ ID NO: 1112 - RNA, 107 nt, Homo sapiens
uucuuauuuaauuacagcuauauugaagauacaauauggguguguguggauucauuuauucacaaacauauauauuugcaucuacaauguguuguacauaguaagaa

SEQ ID NO: 1113 - RNA, 22 nt, Homo sapiens
cuagauggggcuucagggggca

SEQ ID NO: 1114 - RNA, 77 nt, Homo sapiens
cccuguccuuacugaggucccaaacugguagaccacuauaaaugaaaggaugcuagauggggcuucagggggcaugg

SEQ ID NO: 1115 - RNA, 22 nt, Homo sapiens
cgugggggugagcucugaggac

SEQ ID NO: 1116 - RNA, 93 nt, Homo sapiens
ggggcagggcggaggcugcgugggggugagcucugaggacuguccaccucccagcuccucagagagcaccacccugucccuccccucagcccu

SEQ ID NO: 1117 - RNA, 22 nt, Homo sapiens
ucuguuucuuucugucucuugg

SEQ ID NO: 1118 - RNA, 69 nt, Homo sapiens
uguuuuucuguuucuuucugucucuugguuccuuaagggcuuugaugaucagggcagaagcagaaggca

SEQ ID NO: 1119 - RNA, 22 nt, Homo sapiens
ugaugaucagggcagaagcaga

SEQ ID NO: 1120 - RNA, 69 nt, Homo sapiens; identical to SEQ ID NO: 1118

SEQ ID NO: 1121 - RNA, 22 nt, Homo sapiens
uaacacuggggguucuguguca

SEQ ID NO: 1122 - RNA, 74 nt, Homo sapiens; identical to SEQ ID NO: 304

SEQ ID NO: 1123 - RNA, 22 nt, Homo sapiens
gaugacugugguguaggguggc

SEQ ID NO: 1124 - RNA, 70 nt, Homo sapiens; identical to SEQ ID NO: 628

SEQ ID NO: 1125 - RNA, 22 nt, Homo sapiens
ugggugaugaggaagugaugac

SEQ ID NO: 1126 - RNA, 79 nt, Homo sapiens; identical to SEQ ID NO: 184

SEQ ID NO: 1127 - RNA, 22 nt, Homo sapiens
uggguggagggagggaucagga

SEQ ID NO: 1128 - RNA, 73 nt, Homo sapiens
acuucuaagcugauuccacuuuuuccccagagcugcugcagugcgguguggguggagggagggaucaggaggu

SEQ ID NO: 1129 - RNA, 22 nt, Homo sapiens
uggguucacucauugcuuuuuc

SEQ ID NO: 1130 - RNA, 82 nt, Homo sapiens
uuuguggguucacucauugcuuuuuccccaggucuagaagagugccuggcacauaccaagaagcaaggaagagcucaacaaa

SEQ ID NO: 1131 - RNA, 22 nt, Homo sapiens
uggguggagggagggaucagaa

SEQ ID NO: 1132 - RNA, 120 nt, Homo sapiens
ggaguuucaaugucuuccucccaaaaaccucuaagcugauuccacucuuuccacagaccugcuguagugcgguguggguggagggagggaucagaagguacagaaaaaaaagacugcucc

SEQ ID NO: 1133 - RNA, 22 nt, Homo sapiens
uggucaguagaauguuuugcuu

SEQ ID NO: 1134 - RNA, 65 nt, Homo sapiens
uguggucaguagaauguuuugcuuucuuauagucacaacagcauagaacagucuucugagccaca

SEQ ID NO: 1135 - RNA, 22 nt, Homo sapiens
ggaggcagggggaggaaggaau

SEQ ID NO: 1136 - RNA, 56 nt, Homo sapiens
ggaggcagggggaggaaggaauguacuauucacggccccacccauccccugccucu

SEQ ID NO: 1137 - RNA, 20 nt, Homo sapiens
ggaguaagagucucccuccc

SEQ ID NO: 1138 - RNA, 69 nt, Homo sapiens
gggaggcuggcaucuugccucuuaaaugguccuauuuuggguuacagaaggaguaagagucucccuccc

SEQ ID NO: 1139 - RNA, 22 nt, Homo sapiens
uggugaggguuggggagccugg

SEQ ID NO: 1140 - RNA, 71 nt, Homo sapiens
gcccagguuucuagacuccuaggcuauccagggcccucagggcuuguggugaggguuggggagccuggugc

SEQ ID NO: 1141 - RNA, 22 nt, Homo sapiens
ugguggcugaggcagggggaug

SEQ ID NO: 1142 - RNA, 95 nt, Homo sapiens
gucagguguggcuggaugugguggcugaggcagggggaugguccagggucugggcugaucuccuggcugcaggcuacucaggacaugcuguggac

SEQ ID NO: 1143 - RNA, 22 nt, Homo sapiens
ugucuccagggcaggugcaggu

SEQ ID NO: 1144 - RNA, 69 nt, Homo sapiens
ggggcugucuccagggcaggugcaggugcugcugagggcuggcuuucugucauggccuggggcagccuc

SEQ ID NO: 1145 - RNA, 22 nt, Homo sapiens
ugugcuauuccaaggccggggg

SEQ ID NO: 1146 - RNA, 76 nt, Homo sapiens
uguuuugagcugugcuauuccaaggccgggggaaugcuuaaagaaacccugaucuuggaauggcacagcugagaca

SEQ ID NO: 1147 - RNA, 22 nt, Homo sapiens
acagaggcacagaugauaggca

SEQ ID NO: 1148 - RNA, 68 nt, Homo sapiens
cugggcucuguuguguggccucaugugccagguugacuuugggacagaggcacagaugauaggcacag

SEQ ID NO: 1149 - RNA, 22 nt, Homo sapiens
acccagguguccaccuagggcc

SEQ ID NO: 1150 - RNA, 143 nt, Homo sapiens
caccuaaggccuggaguuaaucuggggccugauggucaccagggacccagguguccaccuagggccuagugaccaacuagggccugauguccaccuggagucuaguauccgccuuggcccugaugcuacuugaggccugggug

SEQ ID NO: 1151 - RNA, 22 nt, Homo sapiens
cagauggaggagcauccagguu

SEQ ID NO: 1152 - RNA, 72 nt, Homo sapiens
gagguggcagauggaggagcauccagguuuuaggauagcuuauccucugaagcucuuccauuuugcucccuu

SEQ ID NO: 1153 - RNA, 22 nt, Homo sapiens
cagcagaacggaaaaggcuggg

SEQ ID NO: 1154 - RNA, 76 nt, Homo sapiens
gccuggaggcagcagaacggaaaaggcugggcugccucugagccugcgcuuucccucuucugccaccuguccaggc

SEQ ID NO: 1155 - RNA, 22 nt, Homo sapiens
cagcaggauggccaauugccau

SEQ ID NO: 1156 - RNA, 73 nt, Homo sapiens
ggcagcaggauggccaauugccaucaauuucugcagcaagucuggcaucauggcaucuuggcaucuugcugcu

SEQ ID NO: 1157 - RNA, 22 nt, Homo sapiens
cagcgggguguaguggauagag

SEQ ID NO: 1158 - RNA, 62 nt, Homo sapiens; identical to SEQ ID NO: 220

SEQ ID NO: 1159 - RNA, 22 nt, Homo sapiens
cagcugauggggaggguguccu

SEQ ID NO: 1160 - RNA, 83 nt, Homo sapiens
gggcuggaguccaauuccuuccccaccagcugccuuugaccgccagugacccuggcagcugauggggaggguguccucagccc

SEQ ID NO: 1161 - RNA, 22 nt, Homo sapiens
cgcucuugggggagggauggac

SEQ ID NO: 1162 - RNA, 66 nt, Homo sapiens
cgcucuugggggagggauggaccaugcuugagggccacacccuccaucucuuucucuccacgagcg

SEQ ID NO: 1163 - RNA, 22 nt, Homo sapiens
ucauccaugauggggggguaca

SEQ ID NO: 1164 - RNA, 69 nt, Homo sapiens
uuccugucucuccccaaauucugggcgguucuguuuccagcacucauccaugauggggggguacaggaa

SEQ ID NO: 1165 - RNA, 22 nt, Homo sapiens
cugugcgggggcucugugaugc

SEQ ID NO: 1166 - RNA, 101 nt, Homo sapiens
gagcacaaaccugagccaggcacugcaggcauccugagcaggaguuggguccccaaggcggcugugcgggggcucugugaugccuggggaagguucugcuu

SEQ ID NO: 1167 - RNA, 22 nt, Homo sapiens
uaggaggagagaagggcgacau

SEQ ID NO: 1168 - RNA, 66 nt, Homo sapiens
aguuuaggaggagagaagggcgacaucggggcaauccucugagucucucuuuccuccucaggaacu

SEQ ID NO: 1169 - RNA, 22 nt, Homo sapiens
uaggugaauucuagggucaaua

SEQ ID NO: 1170 - RNA, 84 nt, Homo sapiens
uuccuugaguuuaggugaauucuagggucaauauuacaaguuuugacuuugucaugcucuagaauaaaccuaaauuuuuaggga

SEQ ID NO: 1171 - RNA, 22 nt, Homo sapiens
uaguaguagcuugaaaaaacuc

SEQ ID NO: 1172 - RNA, 84 nt, Homo sapiens
guuuuccuaagagucuuuuuaaagcuacuacuaaacagaaagaguagcucuuuaguaguagcuugaaaaaacucguaggaaaau

SEQ ID NO: 1173 - RNA, 22 nt, Homo sapiens
uagucggccuggggcaguugag

SEQ ID NO: 1174 - RNA, 110 nt, Homo sapiens
aaaauacuuuuugguaucucuccucuucccaggaugcugagugaaaccagaugagagggaguuuagucggccuggggcaguugagucguagcaaaaucaggaaguguuuu

SEQ ID NO: 1175 - RNA, 22 nt, Homo sapiens
uauacuuauaaauaaugugguu

SEQ ID NO: 1176 - RNA, 132 nt, Homo sapiens
ucagcaaacuaacagaaagucacuucaaugaucaaauaaccacauuguuuauaaguauaaaguuuauacuccuuauuuauacuuauaaauaaugugguuguuugacuaaaucgcuuucuguuaggggacuga

SEQ ID NO: 1177 - RNA, 22 nt, Homo sapiens
uuucccuucucccuucaccauu

SEQ ID NO: 1178 - RNA, 69 nt, Homo sapiens; identical to SEQ ID NO: 60

SEQ ID NO: 1179 - RNA, 22 nt, Homo sapiens
uuucgacauuaggaaaaugagu

SEQ ID NO: 1180 - RNA, 82 nt, Homo sapiens
aggcuauuacaaaugguuuccuuggugucaaaaauuacuaaauaguucuuuuuucgacauuaggaaaaugagugacaggccu

SEQ ID NO: 1181 - RNA, 20 nt, Homo sapiens
uuugacaggaggugugagcu

SEQ ID NO: 1182 - RNA, 55 nt, Homo sapiens
agcuugcuccucucgucgugcauguccugggacuuuuugacaggaggugugagcu

SEQ ID NO: 1183 - RNA, 22 nt, Homo sapiens
ucgucguaguggaggugcagca

SEQ ID NO: 1184 - RNA, 59 nt, Homo sapiens
cucgucguaguggaggugcagcagcugcaggugcaggagguggacuccauggugaagag

SEQ ID NO: 1185 - RNA, 22 nt, Homo sapiens
gagaaggggucaaaggaaagca

SEQ ID NO: 1186 - RNA, 96 nt, Homo sapiens
aagccuugugggagaaggggucaaaggaaagcaauggccaugacugaggugaugaauucuuuggcuuuucuuuuaugcaauuaacaagcagggcuu

SEQ ID NO: 1187 - RNA, 22 nt, Homo sapiens
uuuuucuuccuucaaucucuuu

SEQ ID NO: 1188 - RNA, 147 nt, Homo sapiens
cuggggccuaggcauuucccucgcuuuauguuuuugguuuuuuuucuuccuucaaucucuuugauuaggccguacguggcuguggcaaggaguuggggaaaaaaauuauaaaaacaggaaagagagaaagaacagccagagccccgg

SEQ ID NO: 1189 - RNA, 22 nt, Homo sapiens
gggaagaaccuaaaggagguga

SEQ ID NO: 1190 - RNA, 87 nt, Homo sapiens
uaacuaauccaucaccucccucagguucuucccugauauuuuucagagaagaaagggaagaaccuaaaggaggugauggauuaauua

SEQ ID NO: 1191 - RNA, 22 nt, Homo sapiens
gggaauaggagagagaagaugg

SEQ ID NO: 1192 - RNA, 179 nt, Homo sapiens
gucaugaaguguaguuggugagaaggucacagauccugaaagguaaaaagaagugcaaagggaauaggagagagaagauggagaugcugcaggguuacaucgguucucuucccaguauucccuuucugugucccuaaucuuccagccucuguaaucuuggcaguucucuaccuucagau

SEQ ID NO: 1193 - RNA, 22 nt, Homo sapiens
gggguggcgagggagggguugu

SEQ ID NO: 1194 - RNA, 74 nt, Homo sapiens
ggggaaagggguggcgagggagggguuguggggcuggggccucacuuccccuccuucccuuuccccuggucccc

SEQ ID NO: 1195 - RNA, 22 nt, Homo sapiens
ggguagggguuggggguggcug

SEQ ID NO: 1196 - RNA, 78 nt, Homo sapiens
ggauagcagcccucucccaagccaccuacccauccccauuucccaggaaggguagggguuggggguggcuggcaauuc

SEQ ID NO: 1197 - RNA, 22 nt, Homo sapiens
agaagcagcuuucaaggugauu

SEQ ID NO: 1198 - RNA, 106 nt, Homo sapiens
ggucauuuaacacuccauuuagucacccuugauaauguucuucuuuccagagguguagugagagaagcagcuuucaaggugauuucucugcauggagguuaugucc

SEQ ID NO: 1199 - RNA, 22 nt, Homo sapiens
guggugauggggcaucagccgc

SEQ ID NO: 1200 - RNA, 88 nt, Homo sapiens
ccucccacaggugugucuacagugccuggucaccaacucuuggguguugagaaguggugauggggcaucagccgcaucugauggcugg

SEQ ID NO: 1201 - RNA, 22 nt, Homo sapiens
guuugaaaugguggggagaggg

SEQ ID NO: 1202 - RNA, 70 nt, Homo sapiens
auccuaaaauguuuccuaccauuuuucuuuuccaguggcuagaaaguuugaaaugguggggagaggggau

SEQ ID NO: 1203 - RNA, 22 nt, Homo sapiens
ggagggguggggaagcaacugc

SEQ ID NO: 1204 - RNA, 107 nt, Homo sapiens
ugagcccaggaguaucaagggggagggguggggaagcaacugcuuaagacuagucuguccgcaucugcugucucugcucuucaccugcaaagcucuucugugcuaca

SEQ ID NO: 1205 - RNA, 22 nt, Homo sapiens
uggggaaaauacaugguuuccc

SEQ ID NO: 1206 - RNA, 67 nt, Homo sapiens
acaggggagcuuaguguacuuccgcuuuguguguguaugagguggggaaaauacaugguuucccugu

SEQ ID NO: 1207 - RNA, 22 nt, Homo sapiens
ggagugggcagauuugggucca

SEQ ID NO: 1208 - RNA, 95 nt, Homo sapiens
ggggcagcccaguguggggagugggcagauuuggguccauacccugcggggccugugugacuugagccugucugcuucugcugcauuucuguccc

SEQ ID NO: 1209 - RNA, 21 nt, Homo sapiens
ggaugggggcuauagaugggg

SEQ ID NO: 1210 - RNA, 72 nt, Homo sapiens
ccccuuacuguggucccacgucccuggccagugaguggccggugaccugggggaugggggcuauagaugggg

SEQ ID NO: 1211 - RNA, 22 nt, Homo sapiens
agagaaaagugugugcagaggg

SEQ ID NO: 1212 - RNA, 78 nt, Homo sapiens
augaggaagagagaaaagugugugcagagggcaggaagaaagcccaagcucugugcauuacacuuuucucagucucau

SEQ ID NO: 1213 - RNA, 22 nt, Homo sapiens
ucagugagucugggggcgugug

SEQ ID NO: 1214 - RNA, 70 nt, Homo sapiens
guggucagugagucugggggcguguguguggguuuccguacuacauauccccggauuuucuaguguccac

SEQ ID NO: 1215 - RNA, 22 nt, Homo sapiens
uggggaaauggguucucuugau

SEQ ID NO: 1216 - RNA, 77 nt, Homo sapiens
ucuacaaugguggggaaauggguucucuugauuauaucauaaaauaaccagaagauuuccuuuaacuaccauguuga

SEQ ID NO: 1217 - RNA, 22 nt, Homo sapiens
uggggaagucugagcggcaguu

SEQ ID NO: 1218 - RNA, 77 nt, Homo sapiens
guggucuugguggggaagucugagcggcaguuuucucugcuaucguaaagcucugccagccauucucccugccucac

SEQ ID NO: 1219 - RNA, 22 nt, Homo sapiens
uggggcaagggguuugucugga

SEQ ID NO: 1220 - RNA, 56 nt, Homo sapiens
uggggcaagggguuugucuggauugcagaucgcauugcacagaccccuggcucuga

SEQ ID NO: 1221 - RNA, 22 nt, Homo sapiens
uggggcacacagauuuauaguu

SEQ ID NO: 1222 - RNA, 83 nt, Homo sapiens
ggguggggcacacagauuuauaguuuggaugggaucuuuaaggaauaggcccugguuaagacugaacugacugugcccugccc

SEQ ID NO: 1223 - RNA, 22 nt, Homo sapiens
uaaguaguguuuccuacuaauu

SEQ ID NO: 1224 - RNA, 101 nt, Homo sapiens
gaguggcauagugagaaugaguaagaggaaauaucacuuaguauuaacagaugauaauaaguaguguuuccuacuaauugauuauuuaccauaugcuaguc

SEQ ID NO: 1225 - RNA, 22 nt, Homo sapiens
uaauggaggagguaauaagaug

SEQ ID NO: 1226 - RNA, 66 nt, Homo sapiens
uuuaauaauggaggagguaauaagaugucuauuuauucauauuuuaugcccuccuuuauaauuaaa

SEQ ID NO: 1227 - RNA, 22 nt, Homo sapiens
uaauuauggaauuauggcuuaa

SEQ ID NO: 1228 - RNA, 107 nt, Homo sapiens
cacuggggugauguuaccauaauaauuauggaauuauggcuuaaaaucaaaucacuauuguggacauuuaagucaugauucuguguuacuaggaaaccaaacuagug

SEQ ID NO: 1229 - RNA, 22 nt, Homo sapiens
uacacucagcccaggaggagca

SEQ ID NO: 1230 - RNA, 74 nt, Homo sapiens
ccaaaauacacucagcccaggaggagcagcucuccaguacagcugucugcuccugcccugcucggguauuuugg

SEQ ID NO: 1231 - RNA, 22 nt, Homo sapiens
uacccugcccuuuucacaagau

SEQ ID NO: 1232 - RNA, 81 nt, Homo sapiens
uuccaauacccugcccuuuucacaagauuuccgagagagcaguucacagcgcucauuuuguggggagagagggggguggaa

SEQ ID NO: 1233 - RNA, 22 nt, Homo sapiens
uacucauauugauugcauuuau

SEQ ID NO: 1234 - RNA, 88 nt, Homo sapiens
ggcccugagagcaauacucauauugauugcauuuauuucacucuagggaggagagauaauucuucaaugugggacacaucugggagcc

SEQ ID NO: 1235 - RNA, 22 nt, Homo sapiens
uagcuacuguauuuggaggagg

SEQ ID NO: 1236 - RNA, 111 nt, Homo sapiens
aguucaagguugguauaucuguauaaauagcuacuguauuuggaggaggcucauaauccgaaaguccuucaucuauaguagcuauucauauuaauauacuagcuuugaacu

SEQ ID NO: 1237 - RNA, 22 nt, Homo sapiens
uuaagcucuggggaagaagccu

SEQ ID NO: 1238 - RNA, 79 nt, Homo sapiens
uguguguguuuaagcucuggggaagaagccuuauuuuuuccagggauuagggcuucacucacugcuuaaauuauaacca

SEQ ID NO: 1239 - RNA, 22 nt, Homo sapiens
agaggguuugggaagagcaaga

SEQ ID NO: 1240 - RNA, 80 nt, Homo sapiens
cugggcaucuuguucugacaaucucuuuggcagugacccaaggacaguguucagaggguuugggaagagcaagacaccag

SEQ ID NO: 1241 - RNA, 22 nt, Homo sapiens
ucuacucggguggcgugucuug

SEQ ID NO: 1242 - RNA, 56 nt, Homo sapiens
cucuacucggguggcgugucuugcaauuacaaugcaagacaucuaucauagugaug

SEQ ID NO: 1243 - RNA, 22 nt, Homo sapiens
ucagggauccuacuuaacuucu

SEQ ID NO: 1244 - RNA, 144 nt, Homo sapiens
gucuuuccaccuagccuuugccaugucguagauuuauaaaaucagggauccuacuuaacuucucacaggaacaaauauagagaaguuaaguagcaucccugauuuuacaaaucuacuauauggcaaaaggcuagguagaaagau

SEQ ID NO: 1245 - RNA, 22 nt, Homo sapiens
agaggggaaggaguggugucuu

SEQ ID NO: 1246 - RNA, 84 nt, Homo sapiens
gggcagugaagagaggggaaggaguggugucuuuauauugagauauuuugagauuccugcuuucuccacucacuucaacugccc

SEQ ID NO: 1247 - RNA, 22 nt, Homo sapiens
uuagguuucagaagggugcugg

SEQ ID NO: 1248 - RNA, 87 nt, Homo sapiens
gaggccucacaaccuucuagggcacagacggugaaaauggcucaggccagaauuugguuuagguuucagaagggugcugggugccuc

SEQ ID NO: 1249 - RNA, 22 nt, Homo sapiens
ucaggucugcauuuuagaaaga

SEQ ID NO: 1250 - RNA, 65 nt, Homo sapiens
aucaggucugcauuuuagaaagauaggccuguccuguuuaagaauggucuggguggagacuugau

SEQ ID NO: 1251 - RNA, 22 nt, Homo sapiens
agagguggcauggagccuggcu

SEQ ID NO: 1252 - RNA, 124 nt, Homo sapiens
acauucuguaccuaucucuuuucugauuagagagguggcauggagccuggcucauuaggcagaaguaaugagccagucuauacgccaucucuaauuagagaaaagauacaguagguacgacugu

SEQ ID NO: 1253 - RNA, 22 nt, Homo sapiens
cugcugagcuagcacuucccga

SEQ ID NO: 1254 - RNA, 80 nt, Homo sapiens
cugggggcuccaaagugcuguucgugcagguagugugauuacccaaccuacugcugagcuagcacuucccgagcccccgg

SEQ ID NO: 1255 - RNA, 22 nt, Homo sapiens
gagcugguaaaauggaaccaaa

SEQ ID NO: 1256 - RNA, 102 nt, Homo sapiens
gggagccaaaugcuuugcuagagcugguaaaauggaaccaaaucgacuguccaauggauuugguccccuucaaccagcuguagcugugcauugauggcgccg

SEQ ID NO: 1257 - RNA, 22 nt, Homo sapiens
gaaauguggugguuggggggua

SEQ ID NO: 1258 - RNA, 73 nt, Homo sapiens
gagguagaaauguggugguugggggguagagguaucccccuguuauccccccaucuuucccauuuacacacuc

SEQ ID NO: 1259 - RNA, 22 nt, Homo sapiens
cuucagcaaggcagaagggagg

SEQ ID NO: 1260 - RNA, 92 nt, Homo sapiens
acagcaguuauuuuccauuccauuugccugcugagugagcuuccagggacuaaugccuacuucagcaaggcagaagggagguaagcugcugu

SEQ ID NO: 1261 - RNA, 22 nt, Homo sapiens
gaagaggcaggaggagcuaaaa

SEQ ID NO: 1262 - RNA, 79 nt, Homo sapiens
gguuugguguguuggcuccuguuccucugucugggaccuuaagaccauagaagaggcaggaggagcuaaaaaacaaacc

SEQ ID NO: 1263 - RNA, 22 nt, Homo sapiens
uuuggggaauucugcaguugaa

SEQ ID NO: 1264 - RNA, 69 nt, Homo sapiens
ugacucaggugcaguaauugccacagaaauugguuuuggugucuuuggggaauucugcaguugaaccca

SEQ ID NO: 1265 - RNA, 22 nt, Homo sapiens
agcugugguggaguugaugagg

SEQ ID NO: 1266 - RNA, 76 nt, Homo sapiens
gaaaacaccuacguccucuuccacagcucugcagagcacagcucgucagcugugguggaguugaugaggauaagac

SEQ ID NO: 1267 - RNA, 22 nt, Homo sapiens
uccaagugaaaaugucaaauaa

SEQ ID NO: 1268 - RNA, 80 nt, Homo sapiens
uuuugccguguuaguggaucuuuucacuuggguuuguacacaucaaaauccaagugaaaaugucaaauaacacagcaaaa

SEQ ID NO: 1269 - RNA, 22 nt, Homo sapiens
ucuaagugagaugagagggacu

SEQ ID NO: 1270 - RNA, 68 nt, Homo sapiens
ccucuucccaaauucaugucacuggguuacaagagauggaaucuaagugagaugagagggacugaagg

SEQ ID NO: 1271 - RNA, 22 nt, Homo sapiens
ugaccuucauccacuaaagaag

SEQ ID NO: 1272 - RNA, 66 nt, Homo sapiens
gaaugaccuucauccacuaaagaagggauguuuuuaaaaaccucgcaaguggaggaaggcucauuu

SEQ ID NO: 1273 - RNA, 22 nt, Homo sapiens
ugaauuuugcccacaaugggcu

SEQ ID NO: 1274 - RNA, 103 nt, Homo sapiens
agccucuuucuuacacgcaaugaauuuugcccacaaugggcuaauugccaaagcaguucgccaccugugggaguaauuagucacgugucagucuucugagguu

SEQ ID NO: 1275 - RNA, 22 nt, Homo sapiens
ugaccagcugggggaguugaua

SEQ ID NO: 1276 - RNA, 160 nt, Homo sapiens
ggcauuaauuaaguaauaacgaucaagguauggggcauuuccuggggauuaaugaccagcugggggaguugauagcccacagugcagccaagggccauuaaccccagcuggucaucaauuccugggcccuguguuauagucauuauugcuaucauaagcc

SEQ ID NO: 1277 - RNA, 22 nt, Homo sapiens
ugacuagagaggguuaaugggc

SEQ ID NO: 1278 - RNA, 78 nt, Homo sapiens
gggaauuaaugacuagagaggguuaaugggcuaaaacucuguugggucaucaacuuuuccagcuagucauuaauucuc

SEQ ID NO: 1279 - RNA, 20 nt, Homo sapiens
ucaguggaaaugaggccugc

SEQ ID NO: 1280 - RNA, 56 nt, Homo sapiens
guaggcacuguuuuugcugagguauugggguuaaucucaguggaaaugaggccugc

SEQ ID NO: 1281 - RNA, 22 nt, Homo sapiens
ugcugcagucaggaguggggug

SEQ ID NO: 1282 - RNA, 81 nt, Homo sapiens
ucuucugcugcagucaggagugggguggggccccucagggugcucuuggauaccagccccuccccaccccugcagagagga

SEQ ID NO: 1283 - RNA, 22 nt, Homo sapiens
ugcugggggugggggguagacu

SEQ ID NO: 1284 - RNA, 89 nt, Homo sapiens
acagcugucagucccacccaccugcccgugguaguaagcucugggagcauggccucugcugggggugggggguagacuggaggugcugu

SEQ ID NO: 1285 - RNA, 22 nt, Homo sapiens
caggacuggggagcggaaggug

SEQ ID NO: 1286 - RNA, 72 nt, Homo sapiens
acauuucacuccccuccccacugcacccuggcaacagcucugcaggacuggggagcggaaggugagugaugu

SEQ ID NO: 1287 - RNA, 18 nt, Homo sapiens
uuugugcccuuucugccu

SEQ ID NO: 1288 - RNA, 70 nt, Homo sapiens
aggcagaaaccgcaucaaggaaccaauugaacagacauguguccuauucaucuuugugcccuuucugccu

SEQ ID NO: 1289 - RNA, 22 nt, Homo sapiens
ugagcgggucucugggccucag

SEQ ID NO: 1290 - RNA, 77 nt, Homo sapiens
ugagcgggucucugggccucaguugccuuaucuguaaaugagaagguugaacuacaugagcuuugaagacccuuuca

SEQ ID NO: 1291 - RNA, 19 nt, Homo sapiens
uuaagggggaggggaaaga

SEQ ID NO: 1292 - RNA, 68 nt, Homo sapiens
ucacuccucuuccuuuuaauugcaauugacccuucagaaaucaaguaaauuaagggggaggggaaaga

SEQ ID NO: 1293 - RNA, 22 nt, Homo sapiens
aagccacguaggugggagacag

SEQ ID NO: 1294 - RNA, 67 nt, Homo sapiens
guuccucuuucccagcccugcuugggugugggugaagcuuacaagccacguaggugggagacagagc

SEQ ID NO: 1295 - RNA, 22 nt, Homo sapiens
ugagggcaggcuucgcagaaga

SEQ ID NO: 1296 - RNA, 92 nt, Homo sapiens
uugcucaagcccugcuucucuaagaagcuugcccugauucugcuggagagggaaaugagggcaggcuucgcagaagaacagcacuugagcaa

SEQ ID NO: 1297 - RNA, 22 nt, Homo sapiens
gaggagcugggcagcugucaug

SEQ ID NO: 1298 - RNA, 66 nt, Homo sapiens
caggaggagcugggcagcugucaugcucauccuaggaaugcaugugucccucccagcuccuuccug

SEQ ID NO: 1299 - RNA, 22 nt, Homo sapiens
ugcuuagaaagcugucgucggg

SEQ ID NO: 1300 - RNA, 114 nt, Homo sapiens
cugcugaugccucuuggaauauuaaaugcuuagaaagcugucgucgggaucacauucuggaaucuugaccauguagucaucugagugggugugacaggaaguauacaccagcag

SEQ ID NO: 1301 - RNA, 18 nt, Homo sapiens
ugucauuugggcugggcu

SEQ ID NO: 1302 - RNA, 55 nt, Homo sapiens
auuucagcccuugacauuccaggaaauagcuccauaaugucauuugggcugggcu

SEQ ID NO: 1303 - RNA, 22 nt, Homo sapiens
gauucuggggcuaacaggagga

SEQ ID NO: 1304 - RNA, 73 nt, Homo sapiens; identical to SEQ ID NO: 736

SEQ ID NO: 1305 - RNA, 22 nt, Homo sapiens
gauugaugcuuucacagaucca

SEQ ID NO: 1306 - RNA, 100 nt, Homo sapiens
uucuaguuauguaacuagaucugugauaccaucaauaccaagagauggcaucacaaaagauggauugaugcuuucacagauccaguuacauaacuaugga

SEQ ID NO: 1307 - RNA, 22 nt, Homo sapiens
gauugcucucucguuucuuaau

SEQ ID NO: 1308 - RNA, 65 nt, Homo sapiens
cuggauugcucucucguuucuuaauguuuuguucaugcaaacauuaagauccagaagcaagacag

SEQ ID NO: 1309 - RNA, 20 nt, Homo sapiens
gcacagcagggugacgggca

SEQ ID NO: 1310 - RNA, 58 nt, Homo sapiens
ugccuguugucugcucucguuccauguccugcuggauggcacagcagggugacgggca

SEQ ID NO: 1311 - RNA, 22 nt, Homo sapiens
uacuuuagauaaauuaugugca

SEQ ID NO: 1312 - RNA, 66 nt, Homo sapiens
ugugcacaugguagguauugaguaugugaauuauugaacauguacuuuagauaaauuaugugcaca

SEQ ID NO: 1313 - RNA, 22 nt, Homo sapiens
agaaugcuuccuuugaaacuga

SEQ ID NO: 1314 - RNA, 68 nt, Homo sapiens
aaaagaaugcuuccuuugaaacugaaguucuuucuacuugguuucagcccaaaggugagcauuuuuuu

SEQ ID NO: 1315 - RNA, 22 nt, Homo sapiens
uacuucagaaucuccaggagua

SEQ ID NO: 1316 - RNA, 93 nt, Homo sapiens
aaucaccuuaaccuuguuguacuucagaaucuccaggaguaauguaugaaguuaguccuggagauucuaaaguauaacaagguugaggugauu

SEQ ID NO: 1317 - RNA, 22 nt, Homo sapiens
uagaugucugaccaccuucugg

SEQ ID NO: 1318 - RNA, 65 nt, Homo sapiens
guguagaugucugaccaccuucugggauccauggucaggauucuagaacgguuaggcuucugugc

SEQ ID NO: 1319 - RNA, 22 nt, Homo sapiens
ugaugagggccugguggcugug

SEQ ID NO: 1320 - RNA, 78 nt, Homo sapiens
ggcaucugugaugagggccugguggcugugccggcugcucagcagauacgcagggcaugggcccugucugcaggugcc

SEQ ID NO: 1321 - RNA, 22 nt, Homo sapiens
ugauggccaggccaggggauac

SEQ ID NO: 1322 - RNA, 75 nt, Homo sapiens
cucacugugauggccaggccaggggauacauccugguggcccuucugugucacuggccuuugccauaaaaguggg

SEQ ID NO: 1323 - RNA, 22 nt, Homo sapiens
ugauggggcugcaugguuagcg

SEQ ID NO: 1324 - RNA, 82 nt, Homo sapiens
gaugaaacaaugugauggggcugcaugguuagcggcugucccucugcaucgguguccauggcauccccauuucacaugcauc

SEQ ID NO: 1325 - RNA, 22 nt, Homo sapiens
ugcagaggggacagugggaguc

SEQ ID NO: 1326 - RNA, 72 nt, Homo sapiens; identical to SEQ ID NO: 372

SEQ ID NO: 1327 - RNA, 22 nt, Homo sapiens
uguuugaaagcuguugcccuca

SEQ ID NO: 1328 - RNA, 95 nt, Homo sapiens; identical to SEQ ID NO: 908

SEQ ID NO: 1329 - RNA, 22 nt, Homo sapiens
uuaauggcuggcugggaggcag

SEQ ID NO: 1330 - RNA, 103 nt, Homo sapiens
agcaaaagacauuuccuuagaauuaauggcuggcugggaggcagagccaagggccacugguuccucccagcuggucauuaauccucaggaaaugccugcaccu

SEQ ID NO: 1331 - RNA, 22 nt, Homo sapiens
uuagaauucccuuauuccauuu

SEQ ID NO: 1332 - RNA, 69 nt, Homo sapiens
gcucuaauuagaauucccuuauuccauuucuguuucucaggagaggacagggggcuuuuuaauuggggc

SEQ ID NO: 1333 - RNA, 22 nt, Homo sapiens
aacaagucacagccggccucau

SEQ ID NO: 1334 - RNA, 110 nt, Homo sapiens
agauuagaguggcuguggucuagugcuguguggaagacuagugauuuuguuguucugauguacuacgacaacaagucacagccggccucauagcgcagacucccuucgac

SEQ ID NO: 1335 - RNA, 22 nt, Homo sapiens
aagcucgcuucuaugggucugu

SEQ ID NO: 1336 - RNA, 81 nt, Homo sapiens; identical to SEQ ID NO: 854

SEQ ID NO: 1337 - RNA, 22 nt, Homo sapiens
ugcucugacuuuauugcacuac

SEQ ID NO: 1338 - RNA, 86 nt, Homo sapiens
acugcuaacgaaugcucugacuuuauugcacuacuguacuuuacagcuagcagugcaauaguauugucaaagcaucugaaagcagg

SEQ ID NO: 1339 - RNA, 22 nt, Homo sapiens
acucuuucccuguugcacuacu

SEQ ID NO: 1340 - RNA, 82 nt, Homo sapiens
ggccugcccgacacucuuucccuguugcacuacuauaggccgcugggaagcagugcaaugaugaaagggcaucggucagguc

SEQ ID NO: 1341 - RNA, 22 nt, Homo sapiens
uugagaaagggggcuauuccuu

SEQ ID NO: 1342 - RNA, 93 nt, Homo sapiens
ucugcaaagaugcaaagaaauaggcccuuuucucaauugagaaaaugugacccaaauugagaaagggggcuauuccuuugcaucugagcauga

SEQ ID NO: 1343 - RNA, 22 nt, Homo sapiens
uugcaugaauuaaagauggggu

SEQ ID NO: 1344 - RNA, 136 nt, Homo sapiens
ugauaagagccaaggaguuuagauuuuuaagacugacaccccccuuuuuaacucauguuguuuuauuuauuuuccccaauugcaugaauuaaagaugggguguuaucucagcuuugaauuccuuagcuugauguca

SEQ ID NO: 1345 - RNA, 22 nt, Homo sapiens
uugcuugccuuccuuuaugauu

SEQ ID NO: 1346 - RNA, 67 nt, Homo sapiens
gaguaucauaaagauggcgauuguauaucacuuuccagugaaauugcuugccuuccuuuaugauuuc

SEQ ID NO: 1347 - RNA, 22 nt, Homo sapiens
uuuaauucuacaagcauuuauu

SEQ ID NO: 1348 - RNA, 90 nt, Homo sapiens
gucuccugacucaauuuaauucuacaagcauuuauuuagcaccuacuaugugccagguacagugcuuagauuuugggaguacagggugac

SEQ ID NO: 1349 - RNA, 22 nt, Homo sapiens
gagcucugauuguugaggaggg

SEQ ID NO: 1350 - RNA, 70 nt, Homo sapiens
ggaaggagcucugauuguugaggagggaacugcgauuucaaaguguccccuuccaaucauagcucccccc

SEQ ID NO: 1351 - RNA, 22 nt, Homo sapiens
uuuaguuugcccacagcaugag

SEQ ID NO: 1352 - RNA, 92 nt, Homo sapiens
ggucccacuagaggauguuuaguuugcccacagcaugagugagggagcaagccuugagcagcuguggcaauucaaaugucuuuccugggacc

SEQ ID NO: 1353 - RNA, 22 nt, Homo sapiens
gagcuggaggccuggugcuguu

SEQ ID NO: 1354 - RNA, 76 nt, Homo sapiens
ucuagaaaggagcuggaggccuggugcuguuggcgcuucugcugcccagcugucaccucuucugguuucucaugga

SEQ ID NO: 1355 - RNA, 22 nt, Homo sapiens
ucagcaguugggaguuauuuuu

SEQ ID NO: 1356 - RNA, 74 nt, Homo sapiens
aguuuuaagaguaauaaauagcuguugaauuguaucaaagaccuuuucagcaguugggaguuauuuuuaaaauu

SEQ ID NO: 1357 - RNA, 22 nt, Homo sapiens
caaaaugugccaggaugucuug

SEQ ID NO: 1358 - RNA, 80 nt, Homo sapiens
gccucugaacaaaaugugccaggaugucuugaucacggcacccccggcucagagaccuuccauggcgucuuuuguucugc

SEQ ID NO: 1359 - RNA, 22 nt, Homo sapiens
caagaguaagaagggaaaggaa

SEQ ID NO: 1360 - RNA, 80 nt, Homo sapiens
ggggaaaacaagaguaagaagggaaaggaaugucucagaaagucagccuccugauucccagucaugcucucucucucccc

SEQ ID NO: 1361 - RNA, 19 nt, Homo sapiens
gaggagaggguuugggggu

SEQ ID NO: 1362 - RNA, 66 nt, Homo sapiens
gccucccuaagaccuuucccuccucccacaggcagaugcccaacuaggaggagaggguuugggggu

SEQ ID NO: 1363 - RNA, 22 nt, Homo sapiens
agucuguuccggagggguacca

SEQ ID NO: 1364 - RNA, 67 nt, Homo sapiens
uuguuaccuccuccucaaugaggcuguugggaaacacuucaaacagucuguuccggagggguaccaa

SEQ ID NO: 1365 - RNA, 22 nt, Homo sapiens
uuuuucucuccuugauuucgug

SEQ ID NO: 1366 - RNA, 119 nt, Homo sapiens
ggaugauaacagaugucugaaaaauuuuucucuccuugauuucguggcuagccauuucaaaaagcuagugaaauuaaagaggaaaaucuuuucaaggcaaauuugggaauuuaucaucc

SEQ ID NO: 1367 - RNA, 22 nt, Homo sapiens
aaacauauauauuugcaucuac

SEQ ID NO: 1368 - RNA, 107 nt, Homo sapiens; identical to SEQ ID NO: 1112

SEQ ID NO: 1369 - RNA, 22 nt, Homo sapiens
aaccaggacugucagcuaauua

SEQ ID NO: 1370 - RNA, 89 nt, Homo sapiens
uauuaaaaauuauguacuuagcugaagguccugguugucuaagcuuaugggacaaccaggacugucagcuaauuauauaauuuuugaua

SEQ ID NO: 1371 - RNA, 22 nt, Homo sapiens
aaaugucuauugagcacccacu

SEQ ID NO: 1372 - RNA, 125 nt, Homo sapiens
ccuagaauagccuagaauaguuccuggcacagagcaggugugcaguaaauauuuguugaugaauaaaguuccacaaaugucuauugagcacccacucuaugccagccccugugcugggcacuagg

SEQ ID NO: 1373 - RNA, 22 nt, Homo sapiens
uaacuaaaggccaaaguuuuca

SEQ ID NO: 1374 - RNA, 84 nt, Homo sapiens
uggaagcaaguaacuaaaggccaaaguuuucaggcuaaaaaacaacauugagaugagaacuuuggcuuuauuuacuugcaacca

SEQ ID NO: 1375 - RNA, 22 nt, Homo sapiens
acggcgguguggaggagaauau

SEQ ID NO: 1376 - RNA, 66 nt, Homo sapiens
uguguucuccuaggucccacugaagaugugcaggugucugcacacggcgguguggaggagaauaua

SEQ ID NO: 1377 - RNA, 22 nt, Homo sapiens
accuccugugugcauggauuac

SEQ ID NO: 1378 - RNA, 97 nt, Homo sapiens
cugcuccuucucccauacccauugcauaucggaguugugaauucucaaaacaccuccugugugcauggauuacaggagggugagccuugucaucgug

SEQ ID NO: 1379 - RNA, 22 nt, Homo sapiens
ggugggugugcagccagaggca

SEQ ID NO: 1380 - RNA, 134 nt, Homo sapiens
ggugugcucagaagaccacccugcaaguuucugccucuguggucacagcuucaugccgugggcguaaaggugggugugcagccagaggcaggaugugcaggcaagauccaaugugguuaaaauuugggaucacu

SEQ ID NO: 1381 - RNA, 22 nt, Homo sapiens
aggggaaacugaggcagcccac

SEQ ID NO: 1382 - RNA, 71 nt, Homo sapiens
gagcugggguggaccgcgguuucugcugagagcauggcggcuacaggggaaacugaggcagcccacagcuc

SEQ ID NO: 1383 - RNA, 22 nt, Homo sapiens
uggugugaaagggacagagagg

SEQ ID NO: 1384 - RNA, 68 nt, Homo sapiens
uggugugaaagggacagagagggucgcuucaaaucgauuuuacuuguccuuucugucuuuucggauca

SEQ ID NO: 1385 - RNA, 22 nt, Homo sapiens
acucuguggcacgggggaaguc

SEQ ID NO: 1386 - RNA, 77 nt, Homo sapiens
gcccagagugggguuuccccagccuagagguaugaaaagacacuucacacucuguggcacgggggaagucccaaggc

SEQ ID NO: 1387 - RNA, 22 nt, Homo sapiens
agaaccuuugcccuccuuuccu

SEQ ID NO: 1388 - RNA, 79 nt, Homo sapiens; identical to SEQ ID NO: 64

SEQ ID NO: 1389 - RNA, 22 nt, Homo sapiens
uaagcuaaucaggacuccaguc

SEQ ID NO: 1390 - RNA, 132 nt, Homo sapiens
uuggcuaguggagauguuaaucugggagguggcuggguccugaaagcaugcacgggaaggaaucguuccuccaucaggaaguaagcuaaucaggacuccagucuuaauggaaaugaaucuuccgcaagcagg

SEQ ID NO: 1391 - RNA, 22 nt, Homo sapiens
agagagggccauggcaggaggg

SEQ ID NO: 1392 - RNA, 87 nt, Homo sapiens
uagggcugaagacagagagggccauggcaggagggaggagggccuugguuuucuuucucuuguguguuccacuuucuucucuuucug

SEQ ID NO: 1393 - RNA, 22 nt, Homo sapiens
agagcuaguagguaguagaguu

SEQ ID NO: 1394 - RNA, 106 nt, Homo sapiens
gguuagcuagugugaggucacagagcuaguagguaguagaguugggaauuaaacccagguuuuucugucuaccuguaaagucuguguucuugaccacuauuuaccc

SEQ ID NO: 1395 - RNA, 22 nt, Homo sapiens
agcucuggggccgggaugagag

SEQ ID NO: 1396 - RNA, 84 nt, Homo sapiens
gucacugcccuuuuauccccggcacccgggcuguggggugacccugggugacagcucuggggccgggaugagaggaacagaggc

SEQ ID NO: 1397 - RNA, 22 nt, Homo sapiens
agcugggggacugcuuuaggag

SEQ ID NO: 1398 - RNA, 66 nt, Homo sapiens
cagcugggggacugcuuuaggaggucgagccucagaccucccaugaggcgugucccugggcagcug

SEQ ID NO: 1399 - RNA, 22 nt, Homo sapiens
ggcuacuucacaacaccagggc

SEQ ID NO: 1400 - RNA, 99 nt, Homo sapiens
cccuggcauggugugguggggcagcugguguugugaaucaggccguugccaaucagagaacggcuacuucacaacaccagggccacaccacacuacagg

SEQ ID NO: 1401 - RNA, 22 nt, Homo sapiens
uaagugggugggcaugggaacu

SEQ ID NO: 1402 - RNA, 88 nt, Homo sapiens
uguauugugagggaguaagugggugggcaugggaacucaagugugggccugagcccugugacucccauccgcucuccccacagcuaca

SEQ ID NO: 1403 - RNA, 22 nt, Homo sapiens
aaagacagggguggagacaggg

SEQ ID NO: 1404 - RNA, 96 nt, Homo sapiens
ugcugcugguaaugagaaagacagggguggagacagggcucaugauguccucuucuucccuuugucuuucccccuguuuucuuucuaugagcauca

SEQ ID NO: 1405 - RNA, 22 nt, Homo sapiens
uggguuuacuagguccuucuga

SEQ ID NO: 1406 - RNA, 59 nt, Homo sapiens
guggguuuacuagguccuucugaaagaucaaauuuugcucggagggacccagaaccuac

SEQ ID NO: 1407 - RNA, 22 nt, Homo sapiens
caucaagagaguggggagcaga

SEQ ID NO: 1408 - RNA, 88 nt, Homo sapiens
ucuaccaucaagagaguggggagcagaugaaacccaauuugacugaaucucuguguaaugggcugcucugcacucaacugauggugga

SEQ ID NO: 1409 - RNA, 22 nt, Homo sapiens
caucuuccugugaagcagugga

SEQ ID NO: 1410 - RNA, 88 nt, Homo sapiens
cucauugggaucucaccaucuuccugugaagcaguggaaguagaugcuauuauuuccauuuuacagaugaagaaaguaagauucagag

SEQ ID NO: 1411 - RNA, 22 nt, Homo sapiens
auuucauuccugggcagggucu

SEQ ID NO: 1412 - RNA, 75 nt, Homo sapiens
aaaagauucuuccagggccugaauguccccuaccccauaggaaggucuacauuucauuccugggcagggucuuuu

SEQ ID NO: 1413 - RNA, 22 nt, Homo sapiens
caagauaggagagggcagugcu

SEQ ID NO: 1414 - RNA, 97 nt, Homo sapiens
gccucuuccuccuucucaguacugucaaucuuacuuggguucaacauuugaccaagauaggagagggcagugcuugguauauaaaaggaacagaggc

SEQ ID NO: 1415 - RNA, 22 nt, Homo sapiens
cagaggcugggagucagcagca

SEQ ID NO: 1416 - RNA, 73 nt, Homo sapiens
accagaggcugggagucagcagcaggaacccagggccagccaguggaggcugcugagauuccagaucuuuggu

SEQ ID NO: 1417 - RNA, 22 nt, Homo sapiens
caggcccugggggagauggagg

SEQ ID NO: 1418 - RNA, 84 nt, Homo sapiens
gccucacuccaccaggcccugggggagauggaggaaaggaaaagucuucuccauuuuccaccagagcugcagaaggaguuuggc

SEQ ID NO: 1419 - RNA, 22 nt, Homo sapiens
cccaaaguucagggaggccggg

SEQ ID NO: 1420 - RNA, 77 nt, Homo sapiens
cccucucccuucggcccugacccuuggaggcagucaccacggcaaccccaaaguucagggaggccggggugaggggg

SEQ ID NO: 1421 - RNA, 22 nt, Homo sapiens
ugcuugcugggguugaggcggu

SEQ ID NO: 1422 - RNA, 67 nt, Homo sapiens
aaccgcacugguccaggcaagcauaacaagagucagaacaguagugcuugcugggguugaggcgguu

SEQ ID NO: 1423 - RNA, 22 nt, Homo sapiens
cgagaaaagggaaggcucccag

SEQ ID NO: 1424 - RNA, 89 nt, Homo sapiens
ggaagaggaagaaucaccgagaaaagggaaggcucccagcagggccaggcaguuggcaguggucccacuucuugagucccuuccuccuu

SEQ ID NO: 1425 - RNA, 22 nt, Homo sapiens
ugcuuggcaccuagcaagcacu

SEQ ID NO: 1426 - RNA, 66 nt, Homo sapiens; identical to SEQ ID NO: 870

SEQ ID NO: 1427 - RNA, 22 nt, Homo sapiens
ugcuuucuagcagguagauguu

SEQ ID NO: 1428 - RNA, 84 nt, Homo sapiens
gagugcuuucuagcagguagauguuauaucauggcagaauucucuuuacagccuaacucagcaucuugcuuguuagaggugcuc

SEQ ID NO: 1429 - RNA, 22 nt, Homo sapiens
uaaccgagcugucuauauccua

SEQ ID NO: 1430 - RNA, 85 nt, Homo sapiens; identical to SEQ ID NO: 888

SEQ ID NO: 1431 - RNA, 22 nt, Homo sapiens
uaauuugaaucuauuugcccuc

SEQ ID NO: 1432 - RNA, 83 nt, Homo sapiens; identical to SEQ ID NO: 290

SEQ ID NO: 1433 - RNA, 22 nt, Homo sapiens
uaaauagcaauguuuccugagc

SEQ ID NO: 1434 - RNA, 136 nt, Homo sapiens
aauaaugguggcagaaaggagguguuuguugcacugaacuaaauagcaauguuuccugagccccuaauaguuggugcucagcaaacauuacuauuuaauucaguacaacaaauaccuucuuucugccagcguuauu

SEQ ID NO: 1435 - RNA, 22 nt, Homo sapiens
uaccugaggguccggggaacag

SEQ ID NO: 1436 - RNA, 76 nt, Homo sapiens
ggccguuccccaggacagucugggguagaggaggucaggauuuaacuaccugaggguccggggaacagauguggcc

SEQ ID NO: 1437 - RNA, 22 nt, Homo sapiens
uacuugaggguccggggaacag

SEQ ID NO: 1438 - RNA, 76 nt, Homo sapiens
ggccguuccccaggacagucugggguagaggaggucaggauuuaacuacuugaggguccggggaacagauguggcc

SEQ ID NO: 1439 - RNA, 22 nt, Homo sapiens
uacuuguaacuauaaaagaugu

SEQ ID NO: 1440 - RNA, 83 nt, Homo sapiens
gcacauuauacuacuuguaacuauaaaagauguaacaaaugaucuaaguacaucauuuguaguuacagguaguauaagggggc

SEQ ID NO: 1441 - RNA, 22 nt, Homo sapiens
ucaaaauguggaaaggagaaag

SEQ ID NO: 1442 - RNA, 69 nt, Homo sapiens
agagacucaaaauguggaaaggagaaagggcuaucagaaguccugugucuccuuacauuuuguguuucu

SEQ ID NO: 1443 - RNA, 22 nt, Homo sapiens
ucacuagaugugagacccaggg

SEQ ID NO: 1444 - RNA, 78 nt, Homo sapiens
ggaaggacucugggcuuccugaaucuauugagugugcuauauacucacuagaugugagacccagggcaagucacuucc

SEQ ID NO: 1445 - RNA, 22 nt, Homo sapiens
ucagggauaaaaauacccaggu

SEQ ID NO: 1446 - RNA, 77 nt, Homo sapiens
gcaacucagggauaaaaauacccagguccagagcaugugacaggcacugcuggaaccgguauuaucccugggguggc

SEQ ID NO: 1447 - RNA, 22 nt, Homo sapiens
ucaggggcgggagugugccuua

SEQ ID NO: 1448 - RNA, 70 nt, Homo sapiens
cagacucaggggcgggagugugccuuagaaaaacuccuuuggggcaguuauucugugcccccacccucug

SEQ ID NO: 1449 - RNA, 22 nt, Homo sapiens
auuucaguggagugaaguucag

SEQ ID NO: 1450 - RNA, 110 nt, Homo sapiens
aaagauccucagacaauccaugugcuucucuuguccuucauuccaccggagucugucucauacccaaccagauuucaguggagugaaguucaggaggcauggagcugaca

SEQ ID NO: 1451 - RNA, 22 nt, Homo sapiens
caaucagcaaguauacugcccu

SEQ ID NO: 1452 - RNA, 110 nt, Homo sapiens
ggccagcugugaguguuucuuuggcagugucuuagcugguuguugugagcaauaguaaggaagcaaucagcaaguauacugcccuagaagugcugcacguuguggggccc

SEQ ID NO: 1453 - RNA, 22 nt, Homo sapiens
ugagucucagauguaaaggauu

SEQ ID NO: 1454 - RNA, 83 nt, Homo sapiens
ggucccacugagucucagauguaaaggauucaaagauguccgcagacaugaauagagucgauacaucuugauucagugagucc

SEQ ID NO: 1455 - RNA, 22 nt, Homo sapiens
ugccuguugaugugcaugucug

SEQ ID NO: 1456 - RNA, 147 nt, Homo sapiens
uucaccauggcuaguuaagaaggacagucugucuuuacugccuguugaugugcaugucugccuacccugagccuacggacaagcaacauuagcaguagugguaacugaaagaaaagagacugaagcuuugccauaggccaugaugaa

SEQ ID NO: 1457 - RNA, 22 nt, Homo sapiens
uggcgaagggaaaggagggagu

SEQ ID NO: 1458 - RNA, 72 nt, Homo sapiens
cccaucgucuucuccccucccucccagauuuuuuauaaacaaacuggcgaagggaaaggagggagugacggg

SEQ ID NO: 1459 - RNA, 22 nt, Homo sapiens
uggcugacccuggggagcuagc

SEQ ID NO: 1460 - RNA, 64 nt, Homo sapiens
acuggcugacccuggggagcuagcugccuugauucauuaauagcuguuccugagucuugccagu

SEQ ID NO: 1461 - RNA, 22 nt, Homo sapiens
ugggaagggugggagugguggg

SEQ ID NO: 1462 - RNA, 68 nt, Homo sapiens
ucacccuccucuuuugcccucccccaucugauuaggcgcggacugggaagggugggagugguggggga

SEQ ID NO: 1463 - RNA, 22 nt, Homo sapiens
ggguugaggcggaugucggcgg

SEQ ID NO: 1464 - RNA, 56 nt, Homo sapiens
ggguugaggcggaugucggcgggaacaucggccuuguccucguccgccucgaacuc

SEQ ID NO: 1465 - RNA, 22 nt, Homo sapiens
ugcuuuuugagggaagggagga

SEQ ID NO: 1466 - RNA, 118 nt, Homo sapiens
ccauauagugaguucguuuccauaaauaaaaacgacuucuccccuugaagaagcagacuaagaagacacugcuuuuugagggaagggaggaggcauguggcugggacuggcagugugg

SEQ ID NO: 1467 - RNA, 22 nt, Homo sapiens
uggcaguggguggcacuguguc

SEQ ID NO: 1468 - RNA, 81 nt, Homo sapiens
ggcugcaugggcacaguguggccaccuucagucacucugggagggacuggcaguggguggcacuguguccuuuugucugcc

SEQ ID NO: 1469 - RNA, 22 nt, Homo sapiens
uggugaugcuuagggagaagug

SEQ ID NO: 1470 - RNA, 81 nt, Homo sapiens; identical to SEQ ID NO: 42

SEQ ID NO: 1471 - RNA, 22 nt, Homo sapiens
uguagaaagcacgggccccagg

SEQ ID NO: 1472 - RNA, 82 nt, Homo sapiens
uuguucuuagaguuucggguguuuuucuccagucuuguuacuguagacuguagaaagcacgggccccaggcucugagcuuag

SEQ ID NO: 1473 - RNA, 22 nt, Homo sapiens
uguagcaggccagagaaugagg

SEQ ID NO: 1474 - RNA, 70 nt, Homo sapiens
agacacuguagcaggccagagaaugagguguucuaaaauccccucucucugguccugcugcaacuuguuu

SEQ ID NO: 1475 - RNA, 22 nt, Homo sapiens
ugugcuaaaauugcagacacua

SEQ ID NO: 1476 - RNA, 105 nt, Homo sapiens; identical to SEQ ID NO: 868

SEQ ID NO: 1477 - RNA, 22 nt, Homo sapiens
uguuaagcauauuaccugcauu

SEQ ID NO: 1478 - RNA, 69 nt, Homo sapiens
uaaaaugcagguaaaauacuuagcacaguacgcaguggauguacuguuaagcauauuaccugcauuuua

SEQ ID NO: 1479 - RNA, 18 nt, Homo sapiens
agggcaggccuggcucug

SEQ ID NO: 1480 - RNA, 59 nt, Homo sapiens
cagaagccgacugccccucugguugcuuguaacuuuaaaagagggcaggccuggcucug

SEQ ID NO: 1481 - RNA, 22 nt, Homo sapiens
uguuuauggaacaggaggaguu

SEQ ID NO: 1482 - RNA, 103 nt, Homo sapiens
agaaaaugucauucagcaguaaagcuccugcugucauaaacacuuagcuuucagggcucacuguuuauggaacaggaggaguuuauugccuuauacauugucu

SEQ ID NO: 1483 - RNA, 22 nt, Homo sapiens
uuagugcaugguuggugcucaa

SEQ ID NO: 1484 - RNA, 63 nt, Homo sapiens
uugggcaucaaccaugacuaauuguauguuuugaagaguacuuagugcaugguuggugcucaa

SEQ ID NO: 1485 - RNA, 22 nt, Homo sapiens
uucaggacgguuggcugaaugg

SEQ ID NO: 1486 - RNA, 76 nt, Homo sapiens
agcuacuucaggacgguuggcugaauggcaacagugauggaauauuuauauuuagccacaugugcugaauguggcu

SEQ ID NO: 1487 - RNA, 22 nt, Homo sapiens
uugauuguugacauugguggca

SEQ ID NO: 1488 - RNA, 68 nt, Homo sapiens
cuugauuguugacauugguggcagcuguuacugccaaucuaucuucaaccaacugugaacauaucaag

SEQ ID NO: 1489 - RNA, 22 nt, Homo sapiens
uugaauuuucagaagauguggc

SEQ ID NO: 1490 - RNA, 130 nt, Homo sapiens
uagagguaauaugcuuacuccacacacacuugaauuuucagaagauguggcuacauagagaaagaacaggguaguauaaccacaucuccugaaaacgcagauguguguggagguaaccauauuaccccua

SEQ ID NO: 1491 - RNA, 22 nt, Homo sapiens
aaggucaaggccaaaagagugg

SEQ ID NO: 1492 - RNA, 74 nt, Homo sapiens
cucucccacuuuuuugguagugccuucugccauucuuuguaaccgagaaggucaaggccaaaagagugguggag

SEQ ID NO: 1493 - RNA, 22 nt, Homo sapiens
uuuggggguuuguggauauguu

SEQ ID NO: 1494 - RNA, 77 nt, Homo sapiens
gcaacuuuggggguuuguggauauguuguuauuggguagagaagccuaguaguguccauaaucucuagagauacugc

SEQ ID NO: 1495 - RNA, 22 nt, Homo sapiens
aaggcuggggucuggguguucu

SEQ ID NO: 1496 - RNA, 68 nt, Homo sapiens
gcagaaagaacccugggccucaugcgucuuaugauucccaugagaaggcuggggucuggguguucugc

SEQ ID NO: 1497 - RNA, 22 nt, Homo sapiens
uuuuccaagcacuaaagggucu

SEQ ID NO: 1498 - RNA, 87 nt, Homo sapiens
cuuagugcuaacuuuuccaagcacuaaagggucuccuucuuuugaggacucacagguguauggaaaaguaagaagccuagcacuaag

SEQ ID NO: 1499 - RNA, 22 nt, Homo sapiens
aaaaaggguagcacaggaagcu

SEQ ID NO: 1500 - RNA, 89 nt, Homo sapiens
gcauuucaagauuguuucuuugcuucccaucuucucuuggguucuauaaaaaagaaaaaggguagcacaggaagcuuguuuugaaaauc

SEQ ID NO: 1501 - RNA, 22 nt, Homo sapiens
aacacaggggcaggcaguggac

SEQ ID NO: 1502 - RNA, 90 nt, Homo sapiens
ggugcacagagaacacaggggcaggcaguggacccaugcagcuccgugagggccagggguguuugucuccuuuguguccucuguuguauc

SEQ ID NO: 1503 - RNA, 22 nt, Homo sapiens
aacugagggaaggcaccugaag

SEQ ID NO: 1504 - RNA, 67 nt, Homo sapiens
uuucuuggguuauuuuuccucucaucuuuugaauuugaaaagaacugagggaaggcaccugaagaaa

SEQ ID NO: 1505 - RNA, 22 nt, Homo sapiens
aagcucacagucuaguuguguu

SEQ ID NO: 1506 - RNA, 93 nt, Homo sapiens
ggucccugcccucuagaagcucacagucuaguuguguucaugugcaagucauuuacccccagcuagauuguaagcuccuugagggcaguuacc

SEQ ID NO: 1507 - RNA, 22 nt, Homo sapiens
ggagugcagggcaggguuuccc

SEQ ID NO: 1508 - RNA, 83 nt, Homo sapiens
gcugcuguugggagacccuggucugcacucuaucuguauucuuacugaagggagugcagggcaggguuucccauacagagggc

SEQ ID NO: 1509 - RNA, 21 nt, Homo sapiens
aagcuuauggagcagaggauu

SEQ ID NO: 1510 - RNA, 93 nt, Homo sapiens
ggacaaccagaaugagauuuucugcucuaucagcucaggcucuaauuuugacugcaagaagcuuauggagcagaggauuaaagcacuggugcu

SEQ ID NO: 1511 - RNA, 22 nt, Homo sapiens
aaggaaaaggcgagaggagagg

SEQ ID NO: 1512 - RNA, 70 nt, Homo sapiens
acuuuccuccucccuuugcuuuauuuugccaagauuaugcuagaaggaaaaggcgagaggagaggagagu

SEQ ID NO: 1513 - RNA, 22 nt, Homo sapiens
aaugcugggagccaucuugaau

SEQ ID NO: 1514 - RNA, 66 nt, Homo sapiens
gaaagaaugcugggagccaucuugaauaaauggaaaguuagacaaaauggcauucagcaaccuuuc

SEQ ID NO: 1515 - RNA, 22 nt, Homo sapiens
aagcugggggagaggaggacca

SEQ ID NO: 1516 - RNA, 108 nt, Homo sapiens
gaugacagggaagacaagagaagcugggggagaggaggaccaagcuucuaaggagucaugucucucucccuucagcuucuuuguuugcccuucaaaauucgugucauc

SEQ ID NO: 1517 - RNA, 22 nt, Homo sapiens
aaguggugauggauuugcaaua

SEQ ID NO: 1518 - RNA, 102 nt, Homo sapiens
agaaagaauagggaagaggguuguccuugcagauucaucacuucuugaagcuuuccagaaguggugauggauuugcaauaagccaucugcuuuuuuuuuuuu

SEQ ID NO: 1519 - RNA, 22 nt, Homo sapiens
uaaaaugcucuucugucauugu

SEQ ID NO: 1520 - RNA, 176 nt, Homo sapiens
uuccguagccagcuggagaaggagaaaugcagagugaaaaggagaaagaagaacuggacaaaauuaaaaugcucuucugucauuguaauaguucauaugggcacugacaggagagcauuuugacuuugucaagugugucugcuacucauuuauuccaucuccugcuuguuaccgaa

SEQ ID NO: 1521 - RNA, 22 nt, Homo sapiens
acaggagggccugacuacuccc

SEQ ID NO: 1522 - RNA, 116 nt, Homo sapiens; identical to SEQ ID NO: 464

SEQ ID NO: 1523 - RNA, 22 nt, Homo sapiens
agagugaucagggauugcaugg

SEQ ID NO: 1524 - RNA, 66 nt, Homo sapiens
ggaaagagugaucagggauugcauggcuauuauuuguaccauggcaaugcccuggcucuccuuucc

SEQ ID NO: 1525 - RNA, 22 nt, Homo sapiens
acuauauguggguguuauaagg

SEQ ID NO: 1526 - RNA, 163 nt, Homo sapiens
guguugcucuuugaaaucaugcuaagaggaaguugugaugcaaaagacuauauguggguguuauaaggcacccaccagaugauuuaugaggcacccacauauagccuuuugcuucacaacuuccuccuagcaugauuucacagucccucaguuacagcagcac

SEQ ID NO: 1527 - RNA, 22 nt, Homo sapiens
acuucaggauaaacaggaaagg

SEQ ID NO: 1528 - RNA, 81 nt, Homo sapiens
gagaaaugcccuauuuucugcugucuuggagaucucaagaucaucacugagacuucaggauaaacaggaaagggguuacuc

SEQ ID NO: 1529 - RNA, 22 nt, Homo sapiens
agaacucccuauaucccagauu

SEQ ID NO: 1530 - RNA, 97 nt, Homo sapiens
aagaauaacacagagaacucccuauaucccagauuaaccaauuuucaauguuauuuuugucauauuugggguauggggagaucuuuuuguuguuuuu

SEQ ID NO: 1531 - RNA, 22 nt, Homo sapiens
agcggguuaggcucggggaauu

SEQ ID NO: 1532 - RNA, 73 nt, Homo sapiens
gcugucagagcggguuaggcucggggaauugguucucuggaucaucucccgggagccagccccuccuggcagc

SEQ ID NO: 1533 - RNA, 22 nt, Homo sapiens
agcugaaagggcaaaagacuga

SEQ ID NO: 1534 - RNA, 99 nt, Homo sapiens
gguccuuaaacacugaaagagcugaaagggcaaaagacugaagacugaacauccugcuguagcagucuuuugcccuuccagcucuuuaggugugucacc

SEQ ID NO: 1535 - RNA, 22 nt, Homo sapiens
aggagcaggagcguggaccaac

SEQ ID NO: 1536 - RNA, 100 nt, Homo sapiens
guauggugcacugcagccuggucccuguccuccuggaccucugaacaggaugcaagaggagcaggagcguggaccaacgcugcccuaccugcucccaugc

SEQ ID NO: 1537 - RNA, 22 nt, Homo sapiens
cuauucauuuuuaaaacccaga

SEQ ID NO: 1538 - RNA, 86 nt, Homo sapiens
gcagggcaaaucuggguuuuaaagaguugauuguugcuuuaucuuuuuagagcuauucauuuuuaaaacccagagcaagacccugu

SEQ ID NO: 1539 - RNA, 22 nt, Homo sapiens
agggacaggaggagcgccaggc

SEQ ID NO: 1540 - RNA, 78 nt, Homo sapiens
cagagggacaggaggagcgccaggcuccagcucgcugcucccccagagccucccagccuggugccuucugguucgcug

SEQ ID NO: 1541 - RNA, 22 nt, Homo sapiens
aggggggccugcaucucugccc

SEQ ID NO: 1542 - RNA, 88 nt, Homo sapiens
gugacccuugggcagggagaguugcuuuccuuuacacaccauuagcagguggcaaagaggggggccugcaucucugcccagcuguugc

SEQ ID NO: 1543 - RNA, 22 nt, Homo sapiens
aggucaggggcaugggguaugg

SEQ ID NO: 1544 - RNA, 80 nt, Homo sapiens
agaggucaggggcaugggguauggccagggaaaagagaaaguuauugguccaagaaggguugccucaugucuuggcuucu

SEQ ID NO: 1545 - RNA, 22 nt, Homo sapiens
uugcuguggggcagacugugag

SEQ ID NO: 1546 - RNA, 62 nt, Homo sapiens; identical to SEQ ID NO: 160

SEQ ID NO: 1547 - RNA, 22 nt, Homo sapiens
aguggaaggaaaaagagcagau

SEQ ID NO: 1548 - RNA, 111 nt, Homo sapiens
ccagcaggccuggauaaaauguuucuguucauuugccucggcucugagccaccagccucagaguggaaggaaaaagagcagauucuggggguguuuugucuggcuugcugg

SEQ ID NO: 1549 - RNA, 22 nt, Homo sapiens
aguggcuggguuuggacggcaa

SEQ ID NO: 1550 - RNA, 85 nt, Homo sapiens
ucagaguggcuggguuuggacggcaaagcaccaggcaaaauguuucccaucccugccagagcuguccaauucuagauuacacuga

SEQ ID NO: 1551 - RNA, 22 nt, Homo sapiens
agugggagagaaacuuugggcu

SEQ ID NO: 1552 - RNA, 78 nt, Homo sapiens
uaggaagagagugggagagaaacuuugggcuuugaaaauguauguuguguuccuaguuucagucccagcuuucugcua

SEQ ID NO: 1553 - RNA, 22 nt, Homo sapiens
auaauguggaauaguggagaac

SEQ ID NO: 1554 - RNA, 78 nt, Homo sapiens
ucuuaugucucuccuaccuuuucucaucauuuuuccucuuccagaguuagauaauguggaauaguggagaacauaaga

SEQ ID NO: 1555 - RNA, 22 nt, Homo sapiens
uugggguauggggagaucuuuu

SEQ ID NO: 1556 - RNA, 97 nt, Homo sapiens; identical to SEQ ID NO: 1530

SEQ ID NO: 1557 - RNA, 22 nt, Homo sapiens
caacuuggggugguacaaggag

SEQ ID NO: 1558 - RNA, 73 nt, Homo sapiens
ucauuuuucuguguaucucuccagagaugcuuuauguauaucuaagcaacuuggggugguacaaggagaaaga

SEQ ID NO: 1559 - RNA, 22 nt, Homo sapiens
caagggggugaggaggguggug

SEQ ID NO: 1560 - RNA, 56 nt, Homo sapiens
caagggggugaggaggguggugggagcaaacacuucccucccuuucuuccucccug

SEQ ID NO: 1561 - RNA, 22 nt, Homo sapiens
cagguggaagaagggccgaguc

SEQ ID NO: 1562 - RNA, 66 nt, Homo sapiens
gagcagguggaagaagggccgagucagggagggggcauuuccuggcugauccucuucauuucucuc

SEQ ID NO: 1563 - RNA, 18 nt, Homo sapiens
cagagagaccagugggga

SEQ ID NO: 1564 - RNA, 68 nt, Homo sapiens
ucccccugguugcuauguugggaguggucuguagggggccaaaggagaagcagagagaccagugggga

SEQ ID NO: 1565 - RNA, 22 nt, Homo sapiens
cagagcuaggauugcuuuuuuu

SEQ ID NO: 1566 - RNA, 80 nt, Homo sapiens
gggaggagaaagcugagaaauucuagcucugcuacagccaguaugagcagcagagcuaggauugcuuuuuuucuucuucu

SEQ ID NO: 1567 - RNA, 22 nt, Homo sapiens
cagagugguacuguggggggcc

SEQ ID NO: 1568 - RNA, 80 nt, Homo sapiens
gaagcagagugguacuguggggggccuggucagagcuccucccugucuccuguccccccagcagcgggccacucuccuuu

SEQ ID NO: 1569 - RNA, 22 nt, Homo sapiens
cagaucaugggaaggagaaugu

SEQ ID NO: 1570 - RNA, 99 nt, Homo sapiens
gcuguccugugaaauacaaaucucucacccauggccugaauauguuugcaaacuaagcagaucaugggaaggagaauguguuggcgucgcugggauggu

SEQ ID NO: 1571 - RNA, 22 nt, Homo sapiens
cagaugcucaauaaacauuugc

SEQ ID NO: 1572 - RNA, 89 nt, Homo sapiens
gucuggcacauagcagaugcucaauaaacauuugcuaaaugaaugaguagaaaggguaacguuuacugagcacuuacuaugugccaggc

SEQ ID NO: 1573 - RNA, 22 nt, Homo sapiens
caguuuggaggagaaagugcgg

SEQ ID NO: 1574 - RNA, 59 nt, Homo sapiens
gcaguuuggaggagaaagugcggguugauuauugacccacgccuucuuucuucaaaugc

SEQ ID NO: 1575 - RNA, 22 nt, Homo sapiens
ccggaagcccuuaccccaaaaa

SEQ ID NO: 1576 - RNA, 90 nt, Homo sapiens
ugcccuucgcgaaucuuuuugcggucugggcuugcuguacauaacucaauagccggaagcccuuaccccaaaaagcauuugcggagggcg

SEQ ID NO: 1577 - RNA, 22 nt, Homo sapiens
cgagguugcccuuuguauauuc

SEQ ID NO: 1578 - RNA, 75 nt, Homo sapiens
uacuuaaagcgagguugcccuuuguauauucgguuuauugacauggaauauacaagggcaagcucucugugagua

SEQ ID NO: 1579 - RNA, 22 nt, Homo sapiens
gcugggaaggcaaagggacguu

SEQ ID NO: 1580 - RNA, 110 nt, Homo sapiens
ggcuacagucuuucuucaugugacucguggacuucccuuugucauccuaugccugagaauauaugaaggaggcugggaaggcaaagggacguucaauugucaucacuggc

SEQ ID NO: 1581 - RNA, 22 nt, Homo sapiens
ccacauuacgguauauggcuga

SEQ ID NO: 1582 - RNA, 66 nt, Homo sapiens
cauaacucucauauacugugguucugagaucuuuauagccacauuacgguauauggcugaguugug

SEQ ID NO: 1583 - RNA, 22 nt, Homo sapiens
ccacuggguguuuggugggcac

SEQ ID NO: 1584 - RNA, 78 nt, Homo sapiens
uccccagucugcccacccaugccacagggcuccucuggccagagccgagccacuggguguuuggugggcacaugguga

SEQ ID NO: 1585 - RNA, 21 nt, Homo sapiens
ccugcaugggagugggggggu

SEQ ID NO: 1586 - RNA, 63 nt, Homo sapiens
accccccaccaacuucugacugggcuucucagaaaugcacagccugcaugggagugggggggu

SEQ ID NO: 1587 - RNA, 22 nt, Homo sapiens
ccuggggugggggcagagagau

SEQ ID NO: 1588 - RNA, 127 nt, Homo sapiens
cagagacagaaggcccagggguugaagagagagugagccuggggugggggcagagagauggacgcugggugcguguuucugcagagcuggccugggcguggccccgugaaggccuaugguaccucug

SEQ ID NO: 1589 - RNA, 22 nt, Homo sapiens
cgagggugcagggcugggguac

SEQ ID NO: 1590 - RNA, 71 nt, Homo sapiens
agcgagggugcagggcugggguacuaauauuagauggacacuauccaugguaccccugccucagccuuccu

SEQ ID NO: 1591 - RNA, 22 nt, Homo sapiens
cgcuuugcucagccaguguaga

SEQ ID NO: 1592 - RNA, 111 nt, Homo sapiens
cgagcguccaugggucagcuauguggacucuagcugccaaaggcgcuucuccuucugaacagagcgcuuugcucagccaguguagacauggccugauaaacaauggaacuu

SEQ ID NO: 1593 - RNA, 22 nt, Homo sapiens
cgguguccuggauugggguggg

SEQ ID NO: 1594 - RNA, 112 nt, Homo sapiens
gcuaacaaaggccaagcgcccugccaagcgguguccuggauuggggugggcguggggguucgccucagguccaggcuccgggaugucgugcaggacagggcgcggcugcggc

SEQ ID NO: 1595 - RNA, 18 nt, Homo sapiens
cuuagucagaggaggcca

SEQ ID NO: 1596 - RNA, 57 nt, Homo sapiens
ugguuuccuuugauaaaaaguucuucaggaaaauaacagcuuagucagaggaggcca

SEQ ID NO: 1597 - RNA, 22 nt, Homo sapiens
gaacugggacagaaaucggaag

SEQ ID NO: 1598 - RNA, 66 nt, Homo sapiens
aggaacugggacagaaaucggaagaaauaauuccccaaucuucugaucccugugcucccaguucuu

SEQ ID NO: 1599 - RNA, 22 nt, Homo sapiens
gaggguguggagguucagggca

SEQ ID NO: 1600 - RNA, 74 nt, Homo sapiens
ggcagagcaggaggguguggagguucagggcaccugccauugguccuagagccacccacaccugcacugaggcc

SEQ ID NO: 1601 - RNA, 22 nt, Homo sapiens
gcccuggggaagggggagggaa

SEQ ID NO: 1602 - RNA, 91 nt, Homo sapiens
uuggccugggucuggcccuccccccucuucuuuggagccuuccuucugaggacaggcccuggggaagggggagggaaagggacugggccaa

SEQ ID NO: 1603 - RNA, 22 nt, Homo sapiens
gagauggggagagccccugaug

SEQ ID NO: 1604 - RNA, 81 nt, Homo sapiens
gaggacuaaaggagauggggagagccccugaugcuggguccagccaccguggggggcuccuuccacauuuucuucagcuuc

SEQ ID NO: 1605 - RNA, 22 nt, Homo sapiens
gagugggagcaagggugauuug

SEQ ID NO: 1606 - RNA, 69 nt, Homo sapiens
uguaggagugggagcaagggugauuuguggaaugagcagcucugaagacaaacuucuccuaauccuaug

SEQ ID NO: 1607 - RNA, 22 nt, Homo sapiens
gauccccuagaccaucccccac

SEQ ID NO: 1608 - RNA, 69 nt, Homo sapiens; identical to SEQ ID NO: 286

SEQ ID NO: 1609 - RNA, 22 nt, Homo sapiens
gcaggaagccagagcaggggag

SEQ ID NO: 1610 - RNA, 96 nt, Homo sapiens
gauuggggacuaggcaggaagccagagcaggggagguucccucaggccagcuugaccugcuccuugaccucuuuggcuccuggcuucuccuccuuc

SEQ ID NO: 1611 - RNA, 22 nt, Homo sapiens
gcaggaugcggaauggcaggug

SEQ ID NO: 1612 - RNA, 69 nt, Homo sapiens
gcuggcaccugccucugcucuccccuccucuugccgagaaggcaggaugcggaauggcaggugaaaggc

SEQ ID NO: 1613 - RNA, 22 nt, Homo sapiens
gcagucugaguuuugaaaggcu

SEQ ID NO: 1614 - RNA, 55 nt, Homo sapiens
gagccucuucaaaacagagcccugacaauuaggcagucugaguuuugaaaggcuu

SEQ ID NO: 1615 - RNA, 22 nt, Homo sapiens
gcagugggggggaggugaugug

SEQ ID NO: 1616 - RNA, 65 nt, Homo sapiens
gcacaucacuuccucucugagccucaguuuccucaugguaaggcagugggggggaggugaugugu

SEQ ID NO: 1617 - RNA, 22 nt, Homo sapiens
gcaugggacuuuaguccagauu

SEQ ID NO: 1618 - RNA, 90 nt, Homo sapiens
ugcuucuacugaagaucugggcuggcuuugucuccuuccucgguaagaacuuaggcaugggacuuuaguccagauugauugugagaagua

SEQ ID NO: 1619 - RNA, 22 nt, Homo sapiens
gcauuugcuggugguggcaggg

SEQ ID NO: 1620 - RNA, 83 nt, Homo sapiens
cauucaucaaaggcauuugcuggugguggcaggggaaaugucacagcacugcugccaccacugccagguaucuuuuuaaaaug

SEQ ID NO: 1621 - RNA, 22 nt, Homo sapiens
ucaugauuggaaaugguuggcc

SEQ ID NO: 1622 - RNA, 58 nt, Homo sapiens
ggugagccauucuauuuagauucacgaccggcugagucaugauuggaaaugguuggcc

SEQ ID NO: 1623 - RNA, 22 nt, Homo sapiens
gccauuugucuuuguaaguaau

SEQ ID NO: 1624 - RNA, 94 nt, Homo sapiens
cauuuccaguuauuacugcuagacaaauggcuuuuaaauuacauccuaaaaggcucacaggccauuugucuuuguaaguaauggcacagaaaug

SEQ ID NO: 1625 - RNA, 22 nt, Homo sapiens
uccaacaucauaaccucagcuc

SEQ ID NO: 1626 - RNA, 84 nt, Homo sapiens
ccaugucuaguccaacaucauaaccucagcuccuagcacaaugcaagcaggcugagguuaugguguuagacuagacagaaaugg

SEQ ID NO: 1627 - RNA, 22 nt, Homo sapiens
gcgcaguggugcgaggaugagc

SEQ ID NO: 1628 - RNA, 91 nt, Homo sapiens
gcgcgccgcgcaggcgcaguggugcgaggaugagcugggcgaaauugugaggcgcucgcucgcgcacucugcggcugcgcggccagggcgc

SEQ ID NO: 1629 - RNA, 22 nt, Homo sapiens
gcuggagucagggagaccacua

SEQ ID NO: 1630 - RNA, 73 nt, Homo sapiens
ggcuggagucagggagaccacuaauaauucugucugacagaucucagcuggauuuuucucucugacuuuaguu

SEQ ID NO: 1631 - RNA, 22 nt, Homo sapiens
gcuugggacgagcuggaggaag

SEQ ID NO: 1632 - RNA, 105 nt, Homo sapiens
ggcaccauccugcuucacucacccagucuuccacugucccgccuccacgcuggggacaggcaggcuugggacgagcuggaggaaggggaggggaggaaaaaugcu

SEQ ID NO: 1633 - RNA, 22 nt, Homo sapiens
ggaagaaccagagggagguaau

SEQ ID NO: 1634 - RNA, 134 nt, Homo sapiens
cuuauuugaucaaucccccuguaauuaauccaucaccuccuucagguucuucccuuucuucucugaaaaauauuagggaagaaccagagggagguaauggauuaguuaauugcagggggauuaguguaauuaag

SEQ ID NO: 1635 - RNA, 22 nt, Homo sapiens
ggacgccgaggagcugaagagu

SEQ ID NO: 1636 - RNA, 115 nt, Homo sapiens
gggcugcaggguuggggugcagggacgccgaggagcugaagaguagcauuuaaaaaguuugaauuuuucagcuuccuucccucccugcacauucccaaacuccacuugccagccc

SEQ ID NO: 1637 - RNA, 22 nt, Homo sapiens
ggaggggcaagcuggcagugcc

SEQ ID NO: 1638 - RNA, 65 nt, Homo sapiens
agggaggggcaagcuggcagugccugggaaaagcccgagaaaagcccugucggcucccucuuccu

SEQ ID NO: 1639 - RNA, 22 nt, Homo sapiens
ggaguuuauuagagacugaugg

SEQ ID NO: 1640 - RNA, 95 nt, Homo sapiens
cccaauuuauucuuguccaggcagcauaauaaauaaccugccccuuuuggcagggaguuuauuagagacugaugggacauuuaacaauaacuggg

SEQ ID NO: 1641 - RNA, 22 nt, Homo sapiens
ggagguggaggggagcaggauu

SEQ ID NO: 1642 - RNA, 99 nt, Homo sapiens
guuguacuggggcuucagggagguggaggggagcaggauuuggaaauguaugaaaacaacuaagucccugucccugaccuugagagguucccagacuac

SEQ ID NO: 1643 - RNA, 21 nt, Homo sapiens
ggaugaagaggguggguggga

SEQ ID NO: 1644 - RNA, 70 nt, Homo sapiens
uccugccuaguaccuucuuuucuucugggaauagcuuucccuuucuaagggaugaagaggguggguggga

SEQ ID NO: 1645 - RNA, 22 nt, Homo sapiens
ggcacaaugggggcagaugaaa

SEQ ID NO: 1646 - RNA, 78 nt, Homo sapiens
gggaaacagggcacaaugggggcagaugaaaguccacagucuuuaguuucuaucuuuccuucuugugucuaauuuucc

SEQ ID NO: 1647 - RNA, 22 nt, Homo sapiens
ggccugggacaggguggaacac

SEQ ID NO: 1648 - RNA, 110 nt, Homo sapiens
gucccuggcccagacccuucucuuccacccaaucucauugccuuuagccacaauaaauaucacagggccugggacaggguggaacacugacaggguugcuggccggagau

SEQ ID NO: 1649 - RNA, 22 nt, Homo sapiens
ggcugagacagagggcguuggc

SEQ ID NO: 1650 - RNA, 71 nt, Homo sapiens
ccagggcugagacagagggcguuggcaaggaugcugcuccuucaggcugugaccccucugucuuugcaggg

SEQ ID NO: 1651 - RNA, 22 nt, Homo sapiens
gggaguugggagcagagagggg

SEQ ID NO: 1652 - RNA, 128 nt, Homo sapiens
uccugccggccggcccccuccucaggccccuccuucucagccccagcucccgcucaccccugccacgucaaaggaggcagaaggggaguugggagcagagaggggaccacgggcuggcuggucugggg

SEQ ID NO: 1653 - RNA, 22 nt, Homo sapiens
gggaugggcaagguagaacuca

SEQ ID NO: 1654 - RNA, 66 nt, Homo sapiens
cuaggggaugggcaagguagaacucacccucucuuggaagugggcaucuaucugucugacucuuag

SEQ ID NO: 1655 - RNA, 20 nt, Homo sapiens
gggcagcagaagauaggaag

SEQ ID NO: 1656 - RNA, 65 nt, Homo sapiens
cuuccugucaccuugcucuccuaucaacaugucauuuuguaaaaggggcagcagaagauaggaag

SEQ ID NO: 1657 - RNA, 22 nt, Homo sapiens
gggcccgugugagugaaguguu

SEQ ID NO: 1658 - RNA, 80 nt, Homo sapiens
uuaacacuucaccaacacuggcucccuaaugugcagauucccagauccuuucugaggggcccgugugagugaaguguuga

SEQ ID NO: 1659 - RNA, 22 nt, Homo sapiens
ggggccaccggggaaaaucugc

SEQ ID NO: 1660 - RNA, 143 nt, Homo sapiens
cguccuucgcauuccugggcuggaggaauaaggauccaauugugguuucugcgcugguuaucuuggugccgccgagggggccaccggggaaaaucugcugaauucuuccuuuucuauuuucugccucggcgaggaggagggcg

SEQ ID NO: 1661 - RNA, 22 nt, Homo sapiens
ggguggguugggagggguugua

SEQ ID NO: 1662 - RNA, 76 nt, Homo sapiens
gggggaaagggguggguugggagggguuguagggcuggagacccacuuccccuccuccccguuccccugguccccu

SEQ ID NO: 1663 - RNA, 22 nt, Homo sapiens
gggugugcucagagcagggggc

SEQ ID NO: 1664 - RNA, 55 nt, Homo sapiens
gggugugcucagagcagggggccuaaagaauggcuccucuguuuauaacacaccc

SEQ ID NO: 1665 - RNA, 22 nt, Homo sapiens
ggguugggagggauuguacuga

SEQ ID NO: 1666 - RNA, 87 nt, Homo sapiens
uuggggcgugagcucagggguugggagggauuguacugaccugguucccuuuuugucagaccuuccuucccaauucucagcccccaa

SEQ ID NO: 1667 - RNA, 22 nt, Homo sapiens
ggugagguggcaacauggucau

SEQ ID NO: 1668 - RNA, 91 nt, Homo sapiens
gauuuggagggcagggugagguggcaacauggucaugguguugucuugggauuuuuccacagccguguuccacugccuugucccuaauguc

SEQ ID NO: 1669 - RNA, 19 nt, Homo sapiens
gguggcaguaggaucuacc

SEQ ID NO: 1670 - RNA, 76 nt, Homo sapiens
ggugguuuccuuuugucuccuuuauuacaugggacucugacaugugcccauagcuaggguggcaguaggaucuacc

SEQ ID NO: 1671 - RNA, 22 nt, Homo sapiens
gguggcaguaggaucuacccga

SEQ ID NO: 1672 - RNA, 83 nt, Homo sapiens
ucguggugguuuccuuuugucuccuuuauuacaugggacucugacaugugcccauagcuaggguggcaguaggaucuacccga

SEQ ID NO: 1673 - RNA, 19 nt, Homo sapiens
ggugggaacauggaaagga

SEQ ID NO: 1674 - RNA, 66 nt, Homo sapiens
uccuuuucauccuucccugaacuuuguaauuauaaccucaauaaaagggugggaacauggaaagga

SEQ ID NO: 1675 - RNA, 22 nt, Homo sapiens
ggugggagaugagaagggccaa

SEQ ID NO: 1676 - RNA, 73 nt, Homo sapiens
gggugggagaugagaagggccaaaaggugaauguaugcaccuguuugugugccucuugucauccuuccuuccc

SEQ ID NO: 1677 - RNA, 22 nt, Homo sapiens
gguggggcugaaggaauucacu

SEQ ID NO: 1678 - RNA, 66 nt, Homo sapiens
gagugaucuuucccuucagcguuagccuaauaacaacuuggaggguggggcugaaggaauucacuc

SEQ ID NO: 1679 - RNA, 21 nt, Homo sapiens
guaagugccaguggcagcagg

SEQ ID NO: 1680 - RNA, 105 nt, Homo sapiens
uauuccccuguuggccacugguccuguuaucuuuccacguccccuacuucauuuugaguagguaagugccaguggcagcagguggguaaguaauuuuacccuacu

SEQ ID NO: 1681 - RNA, 22 nt, Homo sapiens
ccuaggccugggggaggggaag

SEQ ID NO: 1682 - RNA, 71 nt, Homo sapiens
ccuaggccugggggaggggaagcagugacagggccauccuaucugaauucuccccacccucaucuccuagg

SEQ ID NO: 1683 - RNA, 22 nt, Homo sapiens
gucgggauggcacaagacuacu

SEQ ID NO: 1684 - RNA, 72 nt, Homo sapiens
uuucaggucgggauggcacaagacuacuaaauuguguguuggcaaaguagugcuguguaucuggaguuggaa

SEQ ID NO: 1685 - RNA, 22 nt, Homo sapiens
ccuaugauuuauguuaccccca

SEQ ID NO: 1686 - RNA, 71 nt, Homo sapiens
agagugggggugugguagauaauuagguuucuuccauauuuagauccuaugauuuauguuacccccacucu

SEQ ID NO: 1687 - RNA, 22 nt, Homo sapiens
guggcaggugggucugaggcug

SEQ ID NO: 1688 - RNA, 80 nt, Homo sapiens
gugccagcuucccucacuuuccaccucuccacagaagaaccuggccgcagguggcaggugggucugaggcugccaagcac

SEQ ID NO: 1689 - RNA, 22 nt, Homo sapiens
guggccaggacagagguggagg

SEQ ID NO: 1690 - RNA, 69 nt, Homo sapiens
gccaccgcacccgcauguccugguccuuucagggcacccggagguggccaggacagagguggagguggc

SEQ ID NO: 1691 - RNA, 22 nt, Homo sapiens
uacauacuucuuuauguaccca

SEQ ID NO: 1692 - RNA, 85 nt, Homo sapiens
accuacucagaguacauacuucuuuauguacccauaugaacauacaaugcuauggaauguaaagaaguauguauuuuugguaggc

SEQ ID NO: 1693 - RNA, 22 nt, Homo sapiens
ugaauuaccgaagggccauaaa

SEQ ID NO: 1694 - RNA, 110 nt, Homo sapiens
ccgcagagugugacuccuguucuguguauggcacugguagaauucacugugaacagucucagucagugaauuaccgaagggccauaaacagagcagagacagauccacga

SEQ ID NO: 1695 - RNA, 22 nt, Homo sapiens
aauuggcuccauuucagacccc

SEQ ID NO: 1696 - RNA, 83 nt, Homo sapiens
cucccucaaauuggcuccauuucagacccccaagaccaagaaagcauugaaaggggaguccugaaggaaccauuuauauggag

SEQ ID NO: 1697 - RNA, 22 nt, Homo sapiens
uacagguaguagguugcguagu

SEQ ID NO: 1698 - RNA, 104 nt, Homo sapiens
gguuccuaaggaagaaguacagguaguagguugcguaguuugaggacagggauuuuauccacaaggagguaauuauaugaccugcugcuaccuuucuuagggcc

SEQ ID NO: 1699 - RNA, 22 nt, Homo sapiens
uagacagaggaggcagcauaau

SEQ ID NO: 1700 - RNA, 76 nt, Homo sapiens
gaugaaguagacagaggaggcagcauaauacuagaccuucuuaguaagcauguucucuuccucauucuucuucauu

SEQ ID NO: 1701 - RNA, 22 nt, Homo sapiens
uaggaaagaaugagggagagga

SEQ ID NO: 1702 - RNA, 132 nt, Homo sapiens
uccugcuggggagggcauggaguauuucagaguaggaaagaaugagggagaggauagucagauaaaucaaaguuucauucuuuuccuccucuuucuuagcucgucaaauccuacacuuucucuccagcugga

SEQ ID NO: 1703 - RNA, 22 nt, Homo sapiens
uaggaagaugguuugcuggcca

SEQ ID NO: 1704 - RNA, 78 nt, Homo sapiens
accauggaacauaguggacacaucccugcugucaacaugcucacaacuucaguaggaagaugguuugcuggccaaggu

SEQ ID NO: 1705 - RNA, 22 nt, Homo sapiens
uaggcaguagcuugaguuauaa

SEQ ID NO: 1706 - RNA, 80 nt, Homo sapiens
uuggccagggaguaggcaguagcuugaguuauaaggaauuucucuuugaggucucggaacugcugauugcucucugccag

SEQ ID NO: 1707 - RNA, 22 nt, Homo sapiens
uaugggucgggauauauuuagu

SEQ ID NO: 1708 - RNA, 71 nt, Homo sapiens
ggagguauauauccugcagcucaugcuguaccuuagacaugccaguaugggucgggauauauuuagucucu

SEQ ID NO: 1709 - RNA, 22 nt, Homo sapiens
uaguuauguuggccccugguuc

SEQ ID NO: 1710 - RNA, 80 nt, Homo sapiens
cugggacaguaguuauguuggccccugguuccaaugggcuggccuaggagcuuggugccugucaucacugcaauucucag

SEQ ID NO: 1711 - RNA, 22 nt, Homo sapiens
uaguugcuugaaggcagugggg

SEQ ID NO: 1712 - RNA, 102 nt, Homo sapiens
uccccuuucgccccauuuuuccaucacugucuuucuugggccacauuuugauuucauaauaguaguugcuugaaggcagugggggaagugggggaauuggga

SEQ ID NO: 1713 - RNA, 22 nt, Homo sapiens
ucaaauauuaugcagcuuggau

SEQ ID NO: 1714 - RNA, 56 nt, Homo sapiens
gucaaauauuaugcagcuuggauacccaauuuaguaugagcugcuuuguauuuggc

SEQ ID NO: 1715 - RNA, 22 nt, Homo sapiens
uccugcuggucaaucacagccc

SEQ ID NO: 1716 - RNA, 97 nt, Homo sapiens
agacucagugcaugagaaguccugcuggucaaucacagccccggagagucugaccagggcuaugguugaccagcaggauuucucauggagugagucu

SEQ ID NO: 1717 - RNA, 22 nt, Homo sapiens
gacuggggaugggggugggcaa

SEQ ID NO: 1718 - RNA, 83 nt, Homo sapiens
cccucugcccucccaugucccuggcagugggcauuucucaaauggugauugaugacuggggaugggggugggcaagccgaggg

SEQ ID NO: 1719 - RNA, 22 nt, Homo sapiens
ucgggaggaaaagaaagaagac

SEQ ID NO: 1720 - RNA, 75 nt, Homo sapiens; identical to SEQ ID NO: 812

SEQ ID NO: 1721 - RNA, 20 nt, Homo sapiens
ucugggugcaaguggagggu

SEQ ID NO: 1722 - RNA, 64 nt, Homo sapiens
acuuuccacuguaaauucaggcugcucuuggaucuguuaaugagucugggugcaaguggagggu

SEQ ID NO: 1723 - RNA, 22 nt, Homo sapiens
ucuggugagagacuggaugugu

SEQ ID NO: 1724 - RNA, 92 nt, Homo sapiens
uccacucccgcccaggcucugcgccgcgacuucuauggcucuaccuuucaugagccucauagucuggugagagacuggauguguaaugugga

SEQ ID NO: 1725 - RNA, 22 nt, Homo sapiens
ucuuugaagcacugugagcucc

SEQ ID NO: 1726 - RNA, 79 nt, Homo sapiens
ccuacucccagaggcuuugcagcugcucuuagagccuguaccccggagucuuugaagcacugugagcuccugggugagg

SEQ ID NO: 1727 - RNA, 22 nt, Homo sapiens
ucuuuauagcauacauugacua

SEQ ID NO: 1728 - RNA, 120 nt, Homo sapiens
uccuugaaaaauuaauuggucagguuuugcuauaauggauaacaaccuacguuagagauaccgcauaugaacaaauuauuagucuuuauagcauacauugacuaauuaauuuuccaggga

SEQ ID NO: 1729 - RNA, 22 nt, Homo sapiens
ugaaauagagcccuuguucuug

SEQ ID NO: 1730 - RNA, 74 nt, Homo sapiens
gccuuuaagaucagggacucugucuuuauuauggugacacaugggagugaaauagagcccuuguucuugauggc

SEQ ID NO: 1731 - RNA, 22 nt, Homo sapiens
ugaacugagauacagaguuauu

SEQ ID NO: 1732 - RNA, 99 nt, Homo sapiens
uuucuuuguucuccagauaagugaacugagauacagaguuauuaagcaaguucuuuaauagcuuuguaccucaguucccuuaucuguagaacaaaggaa

SEQ ID NO: 1733 - RNA, 22 nt, Homo sapiens
ugaauuugaggcgugggggugg

SEQ ID NO: 1734 - RNA, 100 nt, Homo sapiens
gaugcauaacuguggguuagugaauuugaggcgugggggugguguggggaaccgauaucuccagacaucccagcuucuauuuauuggggucagaagcauc

SEQ ID NO: 1735 - RNA, 22 nt, Homo sapiens
gauuuaaugugguauuggggaa

SEQ ID NO: 1736 - RNA, 100 nt, Homo sapiens
gaagguaguucaguuucuccagauuaccacagaagacagcucuguggauccuccucagaugagaugauuuaaugugguauuggggaaaugagaagccguc

SEQ ID NO: 1737 - RNA, 22 nt, Homo sapiens
ugagaggaggggaggguccugg

SEQ ID NO: 1738 - RNA, 85 nt, Homo sapiens
aggggagugagaggaggggaggguccuggaagggcgggugcaaccucaacccagcggaggacccugcugaccugcuuaguuguuu

SEQ ID NO: 1739 - RNA, 22 nt, Homo sapiens
ugagcuaccugugcaaguaaau

SEQ ID NO: 1740 - RNA, 82 nt, Homo sapiens
gccuucucagugagcuaccugugcaaguaaauuaaaucaaacauuuaauguuagcugugcagguuacuucauuuaugaaggu

SEQ ID NO: 1741 - RNA, 22 nt, Homo sapiens
ugaggaagaggggugcuggacu

SEQ ID NO: 1742 - RNA, 92 nt, Homo sapiens
ggaugugaggagugaggaagaggggugcuggacugggagaaagaaguaaagguagaucccucagcaucaaccucuccuuccuccucauuucc

SEQ ID NO: 1743 - RNA, 22 nt, Homo sapiens
ugaggaggaggugcgggaaagg

SEQ ID NO: 1744 - RNA, 71 nt, Homo sapiens
cccaaggcccuucuggaaccuucugcaagccuacuguaggagugaggaggaggugcgggaaagggccuggg

SEQ ID NO: 1745 - RNA, 22 nt, Homo sapiens
ugagggcugaggccaggggaga

SEQ ID NO: 1746 - RNA, 97 nt, Homo sapiens
gcccugcaaagcuuuuaguuucccugucaguuuccccucugcugagcaggugauucagugagggcugaggccaggggagagaggagcagagaugggc

SEQ ID NO: 1747 - RNA, 22 nt, Homo sapiens
uggguagguagguaguugugug

SEQ ID NO: 1748 - RNA, 72 nt, Homo sapiens
guggguagguagguaguuguguggaugggugaguaaucuaucccuaaccacugcuauucuuaaccugccuac

SEQ ID NO: 1749 - RNA, 22 nt, Homo sapiens
ugauaggaggguaggaggcaaa

SEQ ID NO: 1750 - RNA, 100 nt, Homo sapiens
gugauaggaucaucaagcagugauaggaggguaggaggcaaacccggacaugaacucaaugccuccuacccucccaucaccgcugcucuccucuugucac

SEQ ID NO: 1751 - RNA, 22 nt, Homo sapiens
ugauauauaaugaggugaggga

SEQ ID NO: 1752 - RNA, 88 nt, Homo sapiens
ucaucuuccucacccacaccuccguauaucacuaagugagcaaggaugagagugauauauaaugaggugagggauguuggaaggauga

SEQ ID NO: 1753 - RNA, 20 nt, Homo sapiens
ugauuggaaaaacuaguuuu

SEQ ID NO: 1754 - RNA, 58 nt, Homo sapiens
agagcuguuuuuccaaacuauugagcauggugacuuagugauuggaaaaacuaguuuu

SEQ ID NO: 1755 - RNA, 22 nt, Homo sapiens
ugcaaugauauugucaaagcau

SEQ ID NO: 1756 - RNA, 142 nt, Homo sapiens
guguauuggggguggugggguccccccugcuggccgcaggugcucugacgagguugcacuacugugcucugagaagcagugcaaugauauugucaaagcaucugggaccagccuuggggaucucccucccuauaacccucac

SEQ ID NO: 1757 - RNA, 22 nt, Homo sapiens
ugcagagcccugaagccgacgg

SEQ ID NO: 1758 - RNA, 80 nt, Homo sapiens
gcgggcaagugcagagcccugaagccgacgggcugcugacccuggagcgcccuggcucggggacuccugcccaggcuggc

SEQ ID NO: 1759 - RNA, 20 nt, Homo sapiens
ugcagguguugcagaaagau

SEQ ID NO: 1760 - RNA, 67 nt, Homo sapiens
gucuuucccagcccuguaccuggcaaggcuaauaauaccuuaggaagugcagguguugcagaaagau

SEQ ID NO: 1761 - RNA, 22 nt, Homo sapiens
ugccaggagggaaaguaaaugg

SEQ ID NO: 1762 - RNA, 65 nt, Homo sapiens
uccagccauuucucuucugucagagcucuaaugagguuuuagugccaggagggaaaguaaaugga

SEQ ID NO: 1763 - RNA, 22 nt, Homo sapiens
uggacuuggagucaggaggccu

SEQ ID NO: 1764 - RNA, 78 nt, Homo sapiens
gagucacaguggacuuggagucaggaggccugagguccuugaagaccucccugaccugcucugguccacugugugcuc

SEQ ID NO: 1765 - RNA, 22 nt, Homo sapiens
uggagaagggaccgggaaggaa

SEQ ID NO: 1766 - RNA, 67 nt, Homo sapiens
caguggagaagggaccgggaaggaaguaauuggaaaucucucuuccucccagguucuaucuccucug

SEQ ID NO: 1767 - RNA, 22 nt, Homo sapiens
uggaggaagcauggaauuugga

SEQ ID NO: 1768 - RNA, 99 nt, Homo sapiens
uuagagucaaugggugguaguggaggaagcauggaauuuggagucugaaaggccuggguucgaaucccugcuucuucacugcuagcccaaggaguuugg

SEQ ID NO: 1769 - RNA, 22 nt, Homo sapiens
uggagggagagaaggcaaggau

SEQ ID NO: 1770 - RNA, 97 nt, Homo sapiens
uuauaaacuguagccuaauaccuucuuucucuuucuccauucuccuuuucuauuugaguggagggagagaaggcaaggauugggcucuguuuuauaa

SEQ ID NO: 1771 - RNA, 22 nt, Homo sapiens
uggcaggagaguggguuugcca

SEQ ID NO: 1772 - RNA, 63 nt, Homo sapiens
aguggcaggagaguggguuugccauuaguucaacacaaacuguuugcccauucucuugacacu

SEQ ID NO: 1773 - RNA, 22 nt, Homo sapiens
uggccuaucaucugacauacag

SEQ ID NO: 1774 - RNA, 66 nt, Homo sapiens
gaguggccuaucaucugacauacaguucaggaguauacaucugagagguguuggauggggcugcuc

SEQ ID NO: 1775 - RNA, 22 nt, Homo sapiens
uggcugugauugggcccagggc

SEQ ID NO: 1776 - RNA, 142 nt, Homo sapiens
ucuuugaucagguuuaugcaguaggaaguuauguuucaguggcugugauugggcccagggcauagcuaagucuauaauuacuagcugguuaaaucagagcucuucuggaauuuagcagccauuuguguaaacugccucaaua

SEQ ID NO: 1777 - RNA, 22 nt, Homo sapiens
ugggaggggcagggauagaagc

SEQ ID NO: 1778 - RNA, 65 nt, Homo sapiens
gugggaggggcagggauagaagcaaagcagagaaaaauugcucuaauuccuucugcuccuucuau

SEQ ID NO: 1779 - RNA, 22 nt, Homo sapiens
uggggaaagcuggggcuagaug

SEQ ID NO: 1780 - RNA, 71 nt, Homo sapiens
ccucuuccccagcuccccaccuuuccuccagagaaaaaggcagacaaguggggaaagcuggggcuagaugg

SEQ ID NO: 1781 - RNA, 22 nt, Homo sapiens
uggggcagguggaagggugagc

SEQ ID NO: 1782 - RNA, 80 nt, Homo sapiens
guggggcagguggaagggugagcaaagaggugcugggaugucuccccuccuccccucccacccuuuucaugcggccccau

SEQ ID NO: 1783 - RNA, 22 nt, Homo sapiens
ugggugugggcaggcuggacag

SEQ ID NO: 1784 - RNA, 92 nt, Homo sapiens
gagggcaaagaggagugggugugggcaggcuggacaggaaggcuguuguccugucagcacccugcccacaugcccacccagccaaggcccuc

SEQ ID NO: 1785 - RNA, 22 nt, Homo sapiens
ugguggcucauauguagucuag

SEQ ID NO: 1786 - RNA, 80 nt, Homo sapiens
agccuccuggcuguaccuuaugugaucauggguggguccuuggcccagugguggcucauauguagucuagccaggaagcu

SEQ ID NO: 1787 - RNA, 22 nt, Homo sapiens
ugugaaucuucugaaaccuuuu

SEQ ID NO: 1788 - RNA, 75 nt, Homo sapiens
ucaggggaaaaggucucaaaggauucacaccaacuauuaaauauagugugaaucuucugaaaccuuuuccuuugg

SEQ ID NO: 1789 - RNA, 22 nt, Homo sapiens
ugucuagcauuuauaaucaacu

SEQ ID NO: 1790 - RNA, 100 nt, Homo sapiens
gccacaguuucuaaauugagugucuagcauuuauaaucaacugcuucauuuaauucaggucgauuuuaaaugcuagccauucauuugguggacugugagc

SEQ ID NO: 1791 - RNA, 22 nt, Homo sapiens
ugucugugcggaagacaaugug

SEQ ID NO: 1792 - RNA, 97 nt, Homo sapiens
ggagagagugucugugcggaagacaaugugucuuuuuggucucauuuaauuuuuuauaaacauugucucugacaaggacacucaaaaauacaucucc

SEQ ID NO: 1793 - RNA, 22 nt, Homo sapiens
uguggcagggggaauugagagg

SEQ ID NO: 1794 - RNA, 128 nt, Homo sapiens
guguccccuauugacucccuggggcuggucacucaguuuuuggccucugcugcaucccucauacuguuccaaguguggcagggggaauugagaggccccuccucaagccuuggucaugauagggguac

SEQ ID NO: 1795 - RNA, 22 nt, Homo sapiens
ugugggaggaaggagccuggga

SEQ ID NO: 1796 - RNA, 96 nt, Homo sapiens
gggagggagccacagugugggaggaaggagccugggaaaaucgccucuggaugcagaucuggggcuucuauuccccugcgcacugaggccucuccc

SEQ ID NO: 1797 - RNA, 22 nt, Homo sapiens
uguucagaggugagagugagcc

SEQ ID NO: 1798 - RNA, 77 nt, Homo sapiens
auuguauaguguucagaggugagagugagcccauccuugcugaauaggggcuucucuagcuugugaaucugugcagu

SEQ ID NO: 1799 - RNA, 22 nt, Homo sapiens
agagccaggcgugaggauuccc

SEQ ID NO: 1800 - RNA, 77 nt, Homo sapiens
aggcaaggggacuuccuggugccacagcucaagucugugacaagagacaagagccaggcgugaggauuccccugccu

SEQ ID NO: 1801 - RNA, 22 nt, Homo sapiens
uguguguggguggggagauggg

SEQ ID NO: 1802 - RNA, 91 nt, Homo sapiens
acaugagaaacauuaacccuuugcuacccagguaaacuuugguaaauauggaguguguguggguggggagauggggugugaaguguuaugu

SEQ ID NO: 1803 - RNA, 22 nt, Homo sapiens
uuaaaaggaagaggcaucccag

SEQ ID NO: 1804 - RNA, 128 nt, Homo sapiens
uugggggcuucccaauuucuggaaaccuggaguuaaaaggaagaggcaucccagauagaaaugauuuccucgagcuggagugccuuuuccuucuauuuccagguuuccagaagcuggggagccucuga

SEQ ID NO: 1805 - RNA, 22 nt, Homo sapiens
uucaggcagcgauggagacuuu

SEQ ID NO: 1806 - RNA, 80 nt, Homo sapiens
uuagugaggaguucaggcagcgauggagacuuuggcacugagggccagagcgugaagucucccugccaggaucucauuag

SEQ ID NO: 1807 - RNA, 22 nt, Homo sapiens
uugaauaaagccagcugugagu

SEQ ID NO: 1808 - RNA, 95 nt, Homo sapiens
agcuuauuuaauaugacaucaguugaauaaagccagcugugaguaauuaucuccgauauuugauuuccagcuguuuuguugaacuguuaugggcu

SEQ ID NO: 1809 - RNA, 22 nt, Homo sapiens
uugcuaggggugggcuugucug

SEQ ID NO: 1810 - RNA, 167 nt, Homo sapiens
agcaugaccaaguuuaaacacagggacaagggcgcuaaacauacuucacugcacaagacauccugcugcuguugcuccaggcucuugggaguugcuaggggugggcuugucuggaggaugaggggcacauuauaguguccuguccucugugggugcuugugucagcu

SEQ ID NO: 1811 - RNA, 20 nt, Homo sapiens
uugggauguuuagcaagagu

SEQ ID NO: 1812 - RNA, 65 nt, Homo sapiens
gccuugcugacauugugacucugucuugcuggcagugagaacuaguugggauguuuagcaagagu

SEQ ID NO: 1813 - RNA, 22 nt, Homo sapiens
uuggugaugguguuguauaggg

SEQ ID NO: 1814 - RNA, 65 nt, Homo sapiens
gcaguuggugaugguguuguauagggggguaauaauauaacucuaugccaacuauuguccccugc

SEQ ID NO: 1815 - RNA, 22 nt, Homo sapiens
acaugguuaacuucuggcuccc

SEQ ID NO: 1816 - RNA, 68 nt, Homo sapiens
gaagagcagccaguuugauuguguugagaucagucauucgcaacaugguuaacuucuggcuccccuuc

SEQ ID NO: 1817 - RNA, 22 nt, Homo sapiens
uuugugccaggauuuaauaaga

SEQ ID NO: 1818 - RNA, 77 nt, Homo sapiens
cacuacaguuugugccaggauuuaauaagauaguguuugugaaaagcaccuuguucagaucuuacacacuguaugug

SEQ ID NO: 1819 - RNA, 22 nt, Homo sapiens
uuuucacugggggaaggaaagg

SEQ ID NO: 1820 - RNA, 73 nt, Homo sapiens
guguaguuuucacugggggaaggaaagguguuauauagaaauguauacauuuuuuauuuccuuaaaauugcau

SEQ ID NO: 1821 - RNA, 21 nt, Homo sapiens
aaagggguggagggugugguu

SEQ ID NO: 1822 - RNA, 58 nt, Homo sapiens
gacuuacacacucugcccugcuguugucaauaacaauaaagggguggagggugugguu

SEQ ID NO: 1823 - RNA, 21 nt, Homo sapiens
aacaacaggggaggaaagccc

SEQ ID NO: 1824 - RNA, 55 nt, Homo sapiens
gggcucuuccuucccugucauauguccuuaaaauaacaacaggggaggaaagccc

SEQ ID NO: 1825 - RNA, 22 nt, Homo sapiens
aacaccccaucuuuaauucaug

SEQ ID NO: 1826 - RNA, 121 nt, Homo sapiens
agcuaaggaauucaaagcugagauaacaccccaucuuuaauucaugcaauuggggaaaauaaauaaaacaacaugaguuaaaaaggggggugucagucuuaaaaaucuaaacuccuuggcu

SEQ ID NO: 1827 - RNA, 22 nt, Homo sapiens
aacugaauuacuucuuccaugg

SEQ ID NO: 1828 - RNA, 65 nt, Homo sapiens
aacugaauuacuucuuccauggaauaaguagacucuugucuugaucugggagagugaauucaguu

SEQ ID NO: 1829 - RNA, 22 nt, Homo sapiens
aagguggugauuagguuuucag

SEQ ID NO: 1830 - RNA, 59 nt, Homo sapiens
aagguggugauuagguuuucagguuuagagaagugugagacaaccuaauuaaacaccuu

SEQ ID NO: 1831 - RNA, 22 nt, Homo sapiens
uaauggccagcugggagaguug

SEQ ID NO: 1832 - RNA, 97 nt, Homo sapiens
ggacauuucuaggggauuaauggccagcugggagaguugauggcccagaggagggacucauuaaccucagcgggccauuaauuccuuaggcacugcc

SEQ ID NO: 1833 - RNA, 22 nt, Homo sapiens
uaaugugaaggacuaagagaag

SEQ ID NO: 1834 - RNA, 92 nt, Homo sapiens
aguuaauuggucuuuuuucuuuucuagcccuucacacuacugaaguaauguuauuaaugugaaggacuaagagaagaaaaagaauauuaauu

SEQ ID NO: 1835 - RNA, 22 nt, Homo sapiens
uacugggaauuugguggggugg

SEQ ID NO: 1836 - RNA, 71 nt, Homo sapiens
gcacccagccccauccagaccaguggccucaggggacgauggauuacugggaauuuggugggguggggugc

SEQ ID NO: 1837 - RNA, 22 nt, Homo sapiens
ucgaucaagaagccggaugugg

SEQ ID NO: 1838 - RNA, 58 nt, Homo sapiens
ucgaucaagaagccggaugugggagccaauccaaucaaacaucugguugcuuggcuga

SEQ ID NO: 1839 - RNA, 22 nt, Homo sapiens
uagaccgagcagcccaacugaa

SEQ ID NO: 1840 - RNA, 96 nt, Homo sapiens
uucuuagaggauugccuuugucuggcugcuuguuuugauggguguaaaacaaauaagauuagaccgagcagcccaacugaaagcgauagcugggag

SEQ ID NO: 1841 - RNA, 22 nt, Homo sapiens
uagaguugggggaacucuggca

SEQ ID NO: 1842 - RNA, 151 nt, Homo sapiens
ggcuuggaggcagaagagaagcagggcguucgaggcuggggauuagaguugggggaacucuggcacuggggaagccagaguuuccagagucaccccuaacucuuacucacuguguggccuuggggagcuugggguuacuucucucuaagcc

SEQ ID NO: 1843 - RNA, 22 nt, Homo sapiens
uagaugccaugggaauauugug

SEQ ID NO: 1844 - RNA, 103 nt, Homo sapiens
ucaguccugaggcagaauuucccguggcaucugauacacagccuggauuuggagcacucacuaggauuagaugccaugggaauauuguguuuaggaacucuga

SEQ ID NO: 1845 - RNA, 22 nt, Homo sapiens
uauggucuuuggguagcagcag

SEQ ID NO: 1846 - RNA, 119 nt, Homo sapiens
gcauuaguucugcugaguaaucuuuaacuugcugcuuuauaaugauuauaaugagauaucacuggguauuauggucuuuggguagcagcaggguagggauuuccaggcugggacuaagc

SEQ ID NO: 1847 - RNA, 22 nt, Homo sapiens
uauuuaagacaggaaccaggag

SEQ ID NO: 1848 - RNA, 75 nt, Homo sapiens
cuuaagucucauggcuucugucuuggaaacuuuaccuuuaaaagauuauuuaagacaggaaccaggagguuuggg

SEQ ID NO: 1849 - RNA, 22 nt, Homo sapiens
uauuuauugauucugggagugu

SEQ ID NO: 1850 - RNA, 70 nt, Homo sapiens
acuauuauuuauugauucugggaguguucuugguaguaggaaaccugaucuagaaucaauaaaugauggu

SEQ ID NO: 1851 - RNA, 21 nt, Homo sapiens
ucaagaggggauuaggggcuu

SEQ ID NO: 1852 - RNA, 55 nt, Homo sapiens
aggccucuuguccuuuccuuggaagcuuccacauucaagaggggauuaggggcuu

SEQ ID NO: 1853 - RNA, 22 nt, Homo sapiens
ucaaggugggaagggcuaauuu

SEQ ID NO: 1854 - RNA, 106 nt, Homo sapiens
uggcaauucucagauucaucccauggcauggaucggccugcaucucaauaguguguguacacauucaaggugggaagggcuaauuuauaguuggggucuugagcca

SEQ ID NO: 1855 - RNA, 22 nt, Homo sapiens
ucaggauuuuuuaguucugagu

SEQ ID NO: 1856 - RNA, 101 nt, Homo sapiens
uuuaaggauauaucguauucaggauuuuuuaguucugaguuggcucucuuaaaguagauuacaaucacacuagaaaauccuggauaagauauauccuugga

SEQ ID NO: 1857 - RNA, 22 nt, Homo sapiens
ucauuagcauucuugaacgugc

SEQ ID NO: 1858 - RNA, 77 nt, Homo sapiens; identical to SEQ ID NO: 752

SEQ ID NO: 1859 - RNA, 22 nt, Homo sapiens
uccaucugucagucuguuuaua

SEQ ID NO: 1860 - RNA, 94 nt, Homo sapiens
ugauacuguaaacaacugacacagccauggaggaguaguguaucugaaauuguuuauacaaaagaauuccaucugucagucuguuuauaguuca

SEQ ID NO: 1861 - RNA, 22 nt, Homo sapiens
ucccuucccccuuucccucaac

SEQ ID NO: 1862 - RNA, 121 nt, Homo sapiens
cuggggugggcugguaaggaucugugccaaccuugcgggugggggagaagggagggggcaggugccuagcagauucccuucccccuuucccucaaccugggcuccccgccagcugccccag

SEQ ID NO: 1863 - RNA, 22 nt, Homo sapiens
ucuggauagggguggaguagaa

SEQ ID NO: 1864 - RNA, 101 nt, Homo sapiens
cuacucuacuuuuucuccaaacuccucuccacucuuguuuagauggucuuuuuucuauucuggauagggguggaguagaaggaaaaaaauguucccaguag

SEQ ID NO: 1865 - RNA, 22 nt, Homo sapiens
ugagggguucugggaauacuau

SEQ ID NO: 1866 - RNA, 70 nt, Homo sapiens
uccauugagggguucugggaauacuauaaccacaaguacgaagcuggagucaccagaaacccucaaugga

SEQ ID NO: 1867 - RNA, 22 nt, Homo sapiens
ugagugccagaugugggggauc

SEQ ID NO: 1868 - RNA, 91 nt, Homo sapiens
cagccuggguaugcgugaccccaaaacagcugguuaauucccugaaaagaauugagugccagaugugggggaucguguaaccugagggcug

SEQ ID NO: 1869 - RNA, 22 nt, Homo sapiens
uggaaccauguccuugcuuuga

SEQ ID NO: 1870 - RNA, 145 nt, Homo sapiens
uuuugcaugguaccuuguuaacugaaaaccaggcauauuggaaccauguccuugcuuugauuuaauuuuaguuacacagaaccaugcaaaaugagaacauaguucugauacauaugaguuucaguuaacaugguacuauacaaaa

SEQ ID NO: 1871 - RNA, 22 nt, Homo sapiens
ugggaggcagaagauuuuguuu

SEQ ID NO: 1872 - RNA, 75 nt, Homo sapiens
aaauugggaggcagaagauuuuguuucaagucucgauuuugccaccuacuagaugggaucucugccccucaguuu

SEQ ID NO: 1873 - RNA, 22 nt, Homo sapiens
ugggcacugccuguggcaccca

SEQ ID NO: 1874 - RNA, 131 nt, Homo sapiens; identical to SEQ ID NO: 432

SEQ ID NO: 1875 - RNA, 22 nt, Homo sapiens
ugugaagugcuggguggcggcu

SEQ ID NO: 1876 - RNA, 58 nt, Homo sapiens
ugugaagugcuggguggcggcuguuguacuggccugcauggccucagcgcuugucaua

SEQ ID NO: 1877 - RNA, 22 nt, Homo sapiens
uguuaaggaccuggaaaaaaaa

SEQ ID NO: 1878 - RNA, 114 nt, Homo sapiens; identical to SEQ ID NO: 794

SEQ ID NO: 1879 - RNA, 22 nt, Homo sapiens
uuauuagaugcuuaccugcgcc

SEQ ID NO: 1880 - RNA, 88 nt, Homo sapiens
ugaaagauuaagauuuauuagaugcuuaccugcgccaaugggagauauacuggcccaaguaagcauccaauaaauguugauucccuca

SEQ ID NO: 1881 - RNA, 20 nt, Homo sapiens
aucacuaaccacacggccag

SEQ ID NO: 1882 - RNA, 77 nt, Homo sapiens
agucuaguuacuaggcaguguaguuagcugauugcuaauaguaccaaucacuaaccacacggccagguaaaaagauu

SEQ ID NO: 1883 - RNA, 22 nt, Homo sapiens
aucacuaacuccacugccauca

SEQ ID NO: 1884 - RNA, 84 nt, Homo sapiens; identical to SEQ ID NO: 846

SEQ ID NO: 1885 - RNA, 22 nt, Homo sapiens
uucccucugacguggagggagg

SEQ ID NO: 1886 - RNA, 56 nt, Homo sapiens
uucccucugacguggagggaggcaggugguugcccggcuuuccucugcacagggaa

SEQ ID NO: 1887 - RNA, 22 nt, Homo sapiens
uuccugcuccacugccggggcu

SEQ ID NO: 1888 - RNA, 82 nt, Homo sapiens; identical to SEQ ID NO: 376

SEQ ID NO: 1889 - RNA, 22 nt, Homo sapiens
uucuugacugcuuaggaaugca

SEQ ID NO: 1890 - RNA, 88 nt, Homo sapiens
guuuguucuccuauuucuugacugcuuaggaaugcagcaacucauacuggugcauucugagcaauuaagaaguuaugggagacuaggc

SEQ ID NO: 1891 - RNA, 22 nt, Homo sapiens
uuucucugagggacagaguggu

SEQ ID NO: 1892 - RNA, 103 nt, Homo sapiens
uucuuaaggcucauaacaucauucauuuucucugagggacagagugguuuuuauuaauggagcaacaucuguucuuucagaaguaaaugaguucccugaagga

SEQ ID NO: 1893 - RNA, 22 nt, Homo sapiens
uuugcuugacuacaucagugag

SEQ ID NO: 1894 - RNA, 97 nt, Homo sapiens
gagcugugagcaauuucauuuugcuugacuacaucagugaggugacaaaaguggcaagcaagauagaguggagugaaaugggagggcuuugaagguc

SEQ ID NO: 1895 - RNA, 22 nt, Homo sapiens
uuuugcagccuggugaggaaau

SEQ ID NO: 1896 - RNA, 89 nt, Homo sapiens
ucuuggagccuugauuucucuaucuuugaggcugcaggaaugaaauaauucugguauuuuugcagccuggugaggaaauagguaucaga

SEQ ID NO: 1897 - RNA, 22 nt, Homo sapiens
uuuuuccauagcuugagguuac

SEQ ID NO: 1898 - RNA, 72 nt, Homo sapiens
ggggccuuccucaggcuaugaaaaaauacuucaugucuaacccuaauuuuuuccauagcuugagguuacccc

SEQ ID NO: 1899 - RNA, 22 nt, Homo sapiens
aaguaacugcuuaguuacaagu

SEQ ID NO: 1900 - RNA, 127 nt, Homo sapiens
uuuauugcuauugaguguuacagcauaaauaucuuaaacuuguaacuaaccaguuacuuugauuuuaggguauaucaaaguaacugcuuaguuacaaguucaagauauuuaaacacucacaaauaga

SEQ ID NO: 1901 - RNA, 22 nt, Homo sapiens
acuucagauauuuaauauauua

SEQ ID NO: 1902 - RNA, 160 nt, Homo sapiens
gauauugccuucaacagugggcaugaccuugagcuagauggcucuuuucaacuucagauauuuaauauauuaaaugcaauucaacuuaagauauaugaaauaucuuaaguuuaaaagagccaucuaguucaaggucaugcuggcuguccagggcaguuuc

SEQ ID NO: 1903 - RNA, 22 nt, Homo sapiens
agcauacaucaguuuuuuccaa

SEQ ID NO: 1904 - RNA, 83 nt, Homo sapiens
cuggaguuaagauggaaaaaacuggugugugcuuauugauguagccaacaagcauacaucaguuuuuuccaacuuaacuccag

SEQ ID NO: 1905 - RNA, 22 nt, Homo sapiens
agcuaacauugcugaagugcuc

SEQ ID NO: 1906 - RNA, 91 nt, Homo sapiens
uggggguggaacaagcuaacauugcugaagugcucagacagugccuggcaccuagugagcacucgacaaauguuagccauccucauccuca

SEQ ID NO: 1907 - RNA, 22 nt, Homo sapiens
uggcccaaggaggaggaaaggg

SEQ ID NO: 1908 - RNA, 84 nt, Homo sapiens
ucccguugcauggcccaaggaggaggaaagggaagugcccuggcugguggaggugcuucccuuuccuccccuuacuauggggga

SEQ ID NO: 1909 - RNA, 22 nt, Homo sapiens
auauucucacagugacacaagc

SEQ ID NO: 1910 - RNA, 66 nt, Homo sapiens
ggggcugugucacugugggcauagaaaguaguacuauuacaauauucucacagugacacaagcccc

SEQ ID NO: 1911 - RNA, 22 nt, Homo sapiens
ggacuaugcuuggcacacagua

SEQ ID NO: 1912 - RNA, 95 nt, Homo sapiens
ugacauauguaaaaacacaggacuaugcuuggcacacaguaccauaagacuuugugcuaugugccaagcacaguccuauguuuucacauauguua

SEQ ID NO: 1913 - RNA, 22 nt, Homo sapiens
auugugcuggugauaacuauag

SEQ ID NO: 1914 - RNA, 66 nt, Homo sapiens
ucugugcuagguacacuggucuuugugaauacuuugcaauugugcuggugauaacuauagcagaga

SEQ ID NO: 1915 - RNA, 22 nt, Homo sapiens
cagauucgauucuaggggaaua

SEQ ID NO: 1916 - RNA, 110 nt, Homo sapiens
ccagagguuguaacguugucuauauauacccuguagaaccgaauuugugugguauccguauagucacagauucgauucuaggggaauauauggucgaugcaaaaacuuca

SEQ ID NO: 1917 - RNA, 22 nt, Homo sapiens
caggugagguucuugggagccu

SEQ ID NO: 1918 - RNA, 86 nt, Homo sapiens
ugccagucucuaggucccugagacccuuuaaccugugaggacauccagggucacaggugagguucuugggagccuggcgucuggcc

SEQ ID NO: 1919 - RNA, 22 nt, Homo sapiens
ggaagcccuuaccccaaaaagu

SEQ ID NO: 1920 - RNA, 72 nt, Homo sapiens
ggaucuuuuugcggucugggcuugcuguuccucucaacaguagucaggaagcccuuaccccaaaaaguaucu

SEQ ID NO: 1921 - RNA, 22 nt, Homo sapiens
cacauaacugaggguagaguuu

SEQ ID NO: 1922 - RNA, 163 nt, Homo sapiens
uuuuuuccagauuuuaagaauuuccagauuauuccaaauuuuaugggcgaaauucugcccucaauuaugcacaugcaacuaauugcacacacauaacugaggguagaguuuggcuuuuggagcugaaaaucucuaaaguucugaauuuuuuucuuggaaaaaa

SEQ ID NO: 1923 - RNA, 22 nt, Homo sapiens
cagguggguuggugggcaaggg

SEQ ID NO: 1924 - RNA, 128 nt, Homo sapiens
guccuucacggugggguucugggggcacagguggguuggugggcaagggcacagcagcuccuucuccagcugcugcccagcccccaacccagagccagaugaacacugacccgcugaggugagcggau

SEQ ID NO: 1925 - RNA, 22 nt, Homo sapiens
caugauuuauaaggcaggaggg

SEQ ID NO: 1926 - RNA, 106 nt, Homo sapiens
ggggucucagcccuuagaucacaugauuuauaaggcaggagggaguccccuggaugauggaacccccucccuuguauaaaucauuugauuuaagggcugaaacccc

SEQ ID NO: 1927 - RNA, 22 nt, Homo sapiens
cccgggcaaggauucugagagg

SEQ ID NO: 1928 - RNA, 84 nt, Homo sapiens
gcucuuccucucuaauccuuugucccugggugagagugcuuucugaaugcaaugcacccgggcaaggauucugagagggugagc

SEQ ID NO: 1929 - RNA, 22 nt, Homo sapiens
ccugcauggugguggggcggga

SEQ ID NO: 1930 - RNA, 89 nt, Homo sapiens
ggugaggcaccugcauggugguggggcgggaaagugggcucucucuugcugccccguccuacucucucacugcaagguguuucuucacc

SEQ ID NO: 1931 - RNA, 22 nt, Homo sapiens
ggaggaggacacuugagccucc

SEQ ID NO: 1932 - RNA, 93 nt, Homo sapiens
gcaugcuguaggagccucuaagaguucuuuucuccugcuuuuucuuuuaauaggccuaucccaggaggaggacacuugagccucccagcuugu

SEQ ID NO: 1933 - RNA, 22 nt, Homo sapiens
gcggcaaaggcagggaacaggc

SEQ ID NO: 1934 - RNA, 78 nt, Homo sapiens
cagagccagcggcaaaggcagggaacaggcaccgcccacucuaggacugggcccugguucugccugugagcuggucug

SEQ ID NO: 1935 - RNA, 22 nt, Homo sapiens
ggagggcagggcccuaagauac

SEQ ID NO: 1936 - RNA, 66 nt, Homo sapiens
ggagggcagggcccuaagauacacaucagaaacaaacguccucauugugucuugggcccugguccc

SEQ ID NO: 1937 - RNA, 22 nt, Homo sapiens
cuuaacacaggaggcaagguaa

SEQ ID NO: 1938 - RNA, 92 nt, Homo sapiens
gguggcucuuugcccugucucacuauguuaagugaccaccaauuacugucugcacuuaacacaggaggcaagguaaccuggagagcaccacc

SEQ ID NO: 1939 - RNA, 22 nt, Homo sapiens
cuuggcagguguugggaggccu

SEQ ID NO: 1940 - RNA, 67 nt, Homo sapiens
ccaggaccuuggacagaccugccaagugaggaaacacuucucacuuggcagguguugggaggccugg

SEQ ID NO: 1941 - RNA, 22 nt, Homo sapiens
gaaaagggcaagagagagggca

SEQ ID NO: 1942 - RNA, 110 nt, Homo sapiens
aggaacuaagucuucuaagccuccuacccuuucucuugccuuucucagaaggcagagguauucagaaaagggcaagagagagggcaagaggcccaggagacuuaguuccu

SEQ ID NO: 1943 - RNA, 22 nt, Homo sapiens
agcgagccacgggagggagugu

SEQ ID NO: 1944 - RNA, 89 nt, Homo sapiens
acacucgcgcgcacacgcucacuccguguccgcgaccgucgucgccggcggaaagcgagccacgggagggagugugugcgcgcgugugu

SEQ ID NO: 1945 - RNA, 22 nt, Homo sapiens
gaagcugggggcaacaccugaa

SEQ ID NO: 1946 - RNA, 67 nt, Homo sapiens
gaagcugggggcaacaccugaauacuuuugccggaaugggcugggcggguaccugcacuccagcuuc

SEQ ID NO: 1947 - RNA, 22 nt, Homo sapiens
ggaguuggggcauggggcauuu

SEQ ID NO: 1948 - RNA, 70 nt, Homo sapiens
ggaucaggaguuggggcauggggcauuuugaguuucgugcuuauguugccuuccccccaucuuuugcucc

SEQ ID NO: 1949 - RNA, 22 nt, Homo sapiens
gacuaggagaggugagaaagug

SEQ ID NO: 1950 - RNA, 79 nt, Homo sapiens
agucaguggacuucacauuucucugacguuugaucuuaaauaagagcagcagacuaggagaggugagaaagugcugauu

SEQ ID NO: 1951 - RNA, 22 nt, Homo sapiens
ggauaagguaggaguugggggu

SEQ ID NO: 1952 - RNA, 119 nt, Homo sapiens
gacaucaucuuuucucuuuccaucccauucucuugccagcuucugccacuggguggggauucaggauaagguaggaguugggggugaaaaagggauggaaugaagugggcauggggguu

SEQ ID NO: 1953 - RNA, 22 nt, Homo sapiens
gagaggugggggcgaugggguu

SEQ ID NO: 1954 - RNA, 100 nt, Homo sapiens
ggacaggugcgccagagaggugggggcgaugggguuaacacugccacaaaaggaaaagcuccagcucacuccccucucuuccagcucauccuaacagucc

SEQ ID NO: 1955 - RNA, 22 nt, Homo sapiens
gagggaagccuaggauuuuugu

SEQ ID NO: 1956 - RNA, 72 nt, Homo sapiens
ccaaucagagggaagccuaggauuuuuguuuuauugcagagaauacagaaguucuuuuuuuucucugaaugg

SEQ ID NO: 1957 - RNA, 22 nt, Homo sapiens
gaucuguuucaggucuccucgc

SEQ ID NO: 1958 - RNA, 79 nt, Homo sapiens
gagcacagggccgagggggcugggcgggcuggguggccucuuccagaucuguuucaggucuccucgccccacagugcuc

SEQ ID NO: 1959 - RNA, 22 nt, Homo sapiens
gauggggaggguggguguaggg

SEQ ID NO: 1960 - RNA, 82 nt, Homo sapiens
caggcuggaaaggucagauggggaggguggguguagggacacuaugugucccuuugccucuccauccucagaugauggucug

SEQ ID NO: 1961 - RNA, 22 nt, Homo sapiens
gauucucaggggacaggcugac

SEQ ID NO: 1962 - RNA, 105 nt, Homo sapiens
cuuggggccuuggccucugcuggcuggcuguaaccugagaagcugugucacuucuuucuucagauucucaggggacaggcugaccaggaggacaggagccccagg

SEQ ID NO: 1963 - RNA, 22 nt, Homo sapiens
ggcaggagagcagaaaggagaa

SEQ ID NO: 1964 - RNA, 75 nt, Homo sapiens
ugccauuuguuuuaucuguucuucagucuguucugucaguacccacaggcaggagagcagaaaggagaaauggca

SEQ ID NO: 1965 - RNA, 22 nt, Homo sapiens
gcacgcacuaaguguaugccaa

SEQ ID NO: 1966 - RNA, 84 nt, Homo sapiens
caaccaagguacagcacgcacuaaguguaugccaagcugacaaccaugcuuggcauauacuuagugcaugcuguacccugguug

SEQ ID NO: 1967 - RNA, 22 nt, Homo sapiens
gcacuauauuuaaaccugugga

SEQ ID NO: 1968 - RNA, 58 nt, Homo sapiens
gcacuauauuuaaaccuguggaugggaauauuccccauucuugguuacgcuguagugc

SEQ ID NO: 1969 - RNA, 22 nt, Homo sapiens
gcagccugggacaucuggaggg

SEQ ID NO: 1970 - RNA, 70 nt, Homo sapiens
gguucuuuccacauuugcuaggcuguauuuauuuuuuaauaccagcagccugggacaucuggaggggauc

SEQ ID NO: 1971 - RNA, 22 nt, Homo sapiens
gcagggggugagguaauggcca

SEQ ID NO: 1972 - RNA, 117 nt, Homo sapiens
aaagcuauucuauagcuguuccuuuuuuauaacugccccaucuuaucccuccuggagaugccgacccagcagggggugagguaauggccaguuauggagaucagaauggauugcuuu

SEQ ID NO: 1973 - RNA, 22 nt, Homo sapiens
gcauaggguggagugggugugc

SEQ ID NO: 1974 - RNA, 83 nt, Homo sapiens
gaguccacacucccucuuugccccuugcugguucucuacugcccccagcauaggguggagugggugugcaguuucugcgacuc

SEQ ID NO: 1975 - RNA, 22 nt, Homo sapiens
gccucugggggguuuugaugga

SEQ ID NO: 1976 - RNA, 58 nt, Homo sapiens
gccucugggggguuuugauggaggagcugccccuucuugcuucauuucucccagaggu

SEQ ID NO: 1977 - RNA, 22 nt, Homo sapiens
gccucuaggauggggagggaaa

SEQ ID NO: 1978 - RNA, 161 nt, Homo sapiens
gcucccuugaagcaagaaagaaggucccagggcugcaaaacuggaagcacagccucuaggauggggagggaaagaugguacuauauccaguuccugcucucugcucauggguggcugugacaacccuggccucacuugauuucuugccacccccugggagu

SEQ ID NO: 1979 - RNA, 22 nt, Homo sapiens
ggaagggggugccugagugcca

SEQ ID NO: 1980 - RNA, 75 nt, Homo sapiens
ccugggucucggguucacuccuuuccugcuccucacagguguaagaauacaggaagggggugccugagugccagg

SEQ ID NO: 1981 - RNA, 22 nt, Homo sapiens
ggcgcggguuggggaggauguu

SEQ ID NO: 1982 - RNA, 91 nt, Homo sapiens
cucaggcgcggguuggggaggauguuuuggaugccgcucugcugacgcuggugcccucuguucuuacauccuccuuaauuuacugccugag

SEQ ID NO: 1983 - RNA, 22 nt, Homo sapiens
ggcgugagcgagcagggaagag

SEQ ID NO: 1984 - RNA, 59 nt, Homo sapiens
ggcgugagcgagcagggaagagcuccuggcagcugccugccugcuugcucgcucgcgcc

SEQ ID NO: 1985 - RNA, 22 nt, Homo sapiens
ggcugggggaacaauauugcug

SEQ ID NO: 1986 - RNA, 105 nt, Homo sapiens
gcuuucauugcaaucguuaauucagcaucauuguucucucaggcuguuacgugacccaacaggcugggggaacaauauugcugaauauaauuggcauaugucagc

SEQ ID NO: 1987 - RNA, 22 nt, Homo sapiens
gggaaaagagagaauuuauagc

SEQ ID NO: 1988 - RNA, 56 nt, Homo sapiens
gggaaaagagagaauuuauagccccagggcccugugggcagauucuuucuuggcuc

SEQ ID NO: 1989 - RNA, 22 nt, Homo sapiens
ggguagugggaaaggcaaggcu

SEQ ID NO: 1990 - RNA, 65 nt, Homo sapiens
aggguagugggaaaggcaaggcuggcaaaaaggggcccugccuggccauuucccccgauuacccu

SEQ ID NO: 1991 - RNA, 22 nt, Homo sapiens
gggaagggcagggucuaugcac

SEQ ID NO: 1992 - RNA, 56 nt, Homo sapiens
gggaagggcagggucuaugcaccaacugccuuugugcagaaaaccuuuccuuuccc

SEQ ID NO: 1993 - RNA, 20 nt, Homo sapiens
gggagggcuuguucugcugg

SEQ ID NO: 1994 - RNA, 60 nt, Homo sapiens
ccagguggaacaggccguccugacuguuuggugacagacagggagggcuuguucugcugg

SEQ ID NO: 1995 - RNA, 22 nt, Homo sapiens
gggaggggcugaggcaguggga

SEQ ID NO: 1996 - RNA, 66 nt, Homo sapiens
gggaggggcugaggcagugggaacagcaugaacccuucccucacguuucacuggcuuaccccuccu

SEQ ID NO: 1997 - RNA, 22 nt, Homo sapiens
ggggagaaggcacaacacagcu

SEQ ID NO: 1998 - RNA, 64 nt, Homo sapiens
ggggagaaggcacaacacagcugcugaaaauuggugguugcaguuguugcugcuucugcucccc

SEQ ID NO: 1999 - RNA, 22 nt, Homo sapiens
gggggaguccagacaacaggcg

SEQ ID NO: 2000 - RNA, 77 nt, Homo sapiens
gggggaguccagacaacaggcgagugaccacgagcuuccuaaauaagaggacugggugccucggucuggcucccacc

SEQ ID NO: 2001 - RNA, 22 nt, Homo sapiens
gggggugggucaugggcucuaa

SEQ ID NO: 2002 - RNA, 59 nt, Homo sapiens
gggggugggucaugggcucuaagcugcucuucugucugucugagcuuaugaacaccccc

SEQ ID NO: 2003 - RNA, 22 nt, Homo sapiens
gggggccgugggugccugucaa

SEQ ID NO: 2004 - RNA, 133 nt, Homo sapiens
ggaaaacagaacuaucuggugggucaaaggcgcauaccagggggccgugggugccugucaaaccggaaugguuaucuggucuggcagagcccagcaucuuggguggccaaacaaaccucagauacaguguucc

SEQ ID NO: 2005 - RNA, 22 nt, Homo sapiens
gggguaggugugagagacccag

SEQ ID NO: 2006 - RNA, 120 nt, Homo sapiens
uuccugacagauggcuuuccagggguaggugugagagacccagaaguagggcucuguaauuagucucccuucacccuuagcccuguccucagccaccucuggacaagauaauguuaggga

SEQ ID NO: 2007 - RNA, 22 nt, Homo sapiens
ggguaggugggauacuauaaca

SEQ ID NO: 2008 - RNA, 119 nt, Homo sapiens
cguauacaaaccguaagagagucuuaaagauacaucaggguaggugggauacuauaacaacauuuagcauauuguuauacuauuccacccaccuuaaugaggauccuuuagguguugcg

SEQ ID NO: 2009 - RNA, 22 nt, Homo sapiens
gucaacgucacagggcgugggg

SEQ ID NO: 2010 - RNA, 71 nt, Homo sapiens
ccgcucccauggccccggaccuuggcaacgcugcgcagcgcgucagucaacgucacagggcgugggggugg

SEQ ID NO: 2011 - RNA, 22 nt, Homo sapiens
uauagggauuggagccguggcg

SEQ ID NO: 2012 - RNA, 90 nt, Homo sapiens
aggccucgcuguucucuauggcuuuuuauuccuaugugauucuacugcucacucauauagggauuggagccguggcgcacggcggggaca

SEQ ID NO: 2013 - RNA, 22 nt, Homo sapiens
ucaguuccuaaugcauugccuu

SEQ ID NO: 2014 - RNA, 110 nt, Homo sapiens
aguauaauuauuacauaguuuuugaugucgcagauacugcaucaggaacugauuggauaagaaucagucaccaucaguuccuaaugcauugccuucagcaucuaaacaag

SEQ ID NO: 2015 - RNA, 22 nt, Homo sapiens
ugcaauguuuccacagugcauc

SEQ ID NO: 2016 - RNA, 69 nt, Homo sapiens
cuguggugcauuguaguugcauugcauguucuggugguacccaugcaauguuuccacagugcaucacag

SEQ ID NO: 2017 - RNA, 22 nt, Homo sapiens
uguagggauggaagccaugaaa

SEQ ID NO: 2018 - RNA, 100 nt, Homo sapiens
agauaaauucacucuagugcuuuauggcuuuuuauuccuaugugauaguaauaaagucucauguagggauggaagccaugaaauacauugugaaaaauca

SEQ ID NO: 2019 - RNA, 22 nt, Homo sapiens
uaauaagauggcaggaggcaga

SEQ ID NO: 2020 - RNA, 59 nt, Homo sapiens
ucuguuuugugucucucugguguuuggugacauaacauaauaagauggcaggaggcaga

SEQ ID NO: 2021 - RNA, 22 nt, Homo sapiens
uacacauaucagguguauacau

SEQ ID NO: 2022 - RNA, 76 nt, Homo sapiens
gcuaccuauauauacaccugcuauguguguggauauguauuuacacauacacauaucagguguauacauacguagc

SEQ ID NO: 2023 - RNA, 22 nt, Homo sapiens
aaauaacuugcuggguucggca

SEQ ID NO: 2024 - RNA, 66 nt, Homo sapiens
auaaaaauaacuugcuggguucggcagcuucuagaaaggcucucugacaagguggguuauuuuuau

SEQ ID NO: 2025 - RNA, 22 nt, Homo sapiens
uacagagggccagggacuuagg

SEQ ID NO: 2026 - RNA, 77 nt, Homo sapiens
ccaaagucauacagagggccagggacuuaggcuuucaugcuggacucuuuucccuggcucucuggcuuggauuuugg

SEQ ID NO: 2027 - RNA, 22 nt, Homo sapiens
uacugacuuugcaauaaagaag

SEQ ID NO: 2028 - RNA, 105 nt, Homo sapiens
auuuccaguuuccccuugagcauacugacuuugcaauaaagaagcugucauuuacagucuucuuuauugcaagguggguaauagcuacagggagaaaaauaagga

SEQ ID NO: 2029 - RNA, 22 nt, Homo sapiens
uacgcacacucaucaacugugu

SEQ ID NO: 2030 - RNA, 90 nt, Homo sapiens
augaguaaacauacgcacacucaucaacugugugugacauguagcacuuuggguugcaggcacaguugaugaugugcauguguuacucau

SEQ ID NO: 2031 - RNA, 22 nt, Homo sapiens
uagaaggggaggggaggucuuc

SEQ ID NO: 2032 - RNA, 94 nt, Homo sapiens
ucuccaucuggcuaagaccugucugucccuuaucugugucuuguucugucuccuccauagaaggggaggggaggucuucaggacuggaugggga

SEQ ID NO: 2033 - RNA, 22 nt, Homo sapiens
uaggccugcugacccagggaga

SEQ ID NO: 2034 - RNA, 77 nt, Homo sapiens; identical to SEQ ID NO: 244

SEQ ID NO: 2035 - RNA, 22 nt, Homo sapiens
uauggccugaaguauauguggc

SEQ ID NO: 2036 - RNA, 118 nt, Homo sapiens
aguuugcaauucauuugaggauccuuuacauauggccugaaguauauguggcauuuaauugaaaaaccaccaaauaaaggcuuuugggccauguaaaggggccaugugggugccaacu

SEQ ID NO: 2037 - RNA, 22 nt, Homo sapiens
uauggggagggcucagucaggc

SEQ ID NO: 2038 - RNA, 86 nt, Homo sapiens
ugggccuggcauauggggagggcucagucaggcuccuucacucauucauguaauaucuauugagcccuuuccaugugccaagccca

SEQ ID NO: 2039 - RNA, 22 nt, Homo sapiens
uaugucugcugaccaucaccuu

SEQ ID NO: 2040 - RNA, 81 nt, Homo sapiens; identical to SEQ ID NO: 848

SEQ ID NO: 2041 - RNA, 22 nt, Homo sapiens
ucaacacuguuggcggggaccu

SEQ ID NO: 2042 - RNA, 83 nt, Homo sapiens
uccagcaucuccaguuagcaguacugauuuuuuuuccccccaacaaaggaacacuacaucaacacuguuggcggggaccugga

SEQ ID NO: 2043 - RNA, 22 nt, Homo sapiens
aaguagggguggagggcgaaga

SEQ ID NO: 2044 - RNA, 86 nt, Homo sapiens
uuucuuucucugccucuaucuccccacuuuauuuuucaggaaaggauggaaaaguagggguggagggcgaagagguuggagaggag

SEQ ID NO: 2045 - RNA, 22 nt, Homo sapiens
ucacuguaaugagggagaaggg

SEQ ID NO: 2046 - RNA, 108 nt, Homo sapiens
ugcagcacucagucagaucccucaucucuguuacagaggugcuuugcgaaaugacugguggcauuucaucacuguaaugagggagaagggaagggacuuucugcugca

SEQ ID NO: 2047 - RNA, 22 nt, Homo sapiens
ucauuauuccuagugcuuacga

SEQ ID NO: 2048 - RNA, 114 nt, Homo sapiens
ucuguaacagugcauagagagcaucauuauuccuagugcuuacgacagagccuggcacauaguacacacucaguaaguacuggaugaaugaaugaaugcauucuauuuuacaga

SEQ ID NO: 2049 - RNA, 22 nt, Homo sapiens
aagugauuggaggugggugggg

SEQ ID NO: 2050 - RNA, 117 nt, Homo sapiens; identical to SEQ ID NO: 102

SEQ ID NO: 2051 - RNA, 22 nt, Homo sapiens
ucuugaaugacugugauuuucu

SEQ ID NO: 2052 - RNA, 74 nt, Homo sapiens
agacaucaucuugaaugacugugauuuucuugaacugaucaccaggcuauuauagucucucaagaaugauaucu

SEQ ID NO: 2053 - RNA, 22 nt, Homo sapiens
ucuggggguggaggggaggguc

SEQ ID NO: 2054 - RNA, 101 nt, Homo sapiens
cugugcaccacccaucuggggguggaggggagggucuaagucuggauuccuaaccuagaaaccucucacucuccuccucccacugccagacaggugaccag

SEQ ID NO: 2055 - RNA, 22 nt, Homo sapiens
aaugcagcccacgaauggagua

SEQ ID NO: 2056 - RNA, 97 nt, Homo sapiens
ccauuuugaaaaaaggaaaaugcagcccacgaauggaguauucugccuuaaaaugauagcucuauucauaggccgcauuuuucuguuuucaaaaugg

SEQ ID NO: 2057 - RNA, 22 nt, Homo sapiens
aaugccucucacagagaacagg

SEQ ID NO: 2058 - RNA, 112 nt, Homo sapiens
gggggacagugaugccacuaugcuccuaaaaugccucucacagagaacaggagucgguuuccuaccccuguucgucugcuagaggucuuugacggcagugccacuaucuccc

SEQ ID NO: 2059 - RNA, 22 nt, Homo sapiens
ugagggagggcaccugaccuug

SEQ ID NO: 2060 - RNA, 79 nt, Homo sapiens
gucagccaugagggagggcaccugaccuugggaguucugucucgcccuaggguggagugcuuuuccucgguugguugau

SEQ ID NO: 2061 - RNA, 22 nt, Homo sapiens
ugcugaaaugcuuuguaauaug

SEQ ID NO: 2062 - RNA, 145 nt, Homo sapiens
aaauugcuuuauucuucuuucauucuuguaaacuaauuucuguucauguuacaaagcauucagcaugaugcuauacccuaccaugcugaaaugcuuuguaauaugaacaaaauuagagaggggaaagagaagaaaccugcaauuu

SEQ ID NO: 2063 - RNA, 22 nt, Homo sapiens
uggacaggacuggggccaggac

SEQ ID NO: 2064 - RNA, 76 nt, Homo sapiens
cccguccugacccagucuuggccguaccacccagcaccaguugccgccccauggacaggacuggggccaggacugg

SEQ ID NO: 2065 - RNA, 22 nt, Homo sapiens
uggguauauaguggcuuuccau

SEQ ID NO: 2066 - RNA, 68 nt, Homo sapiens
uucauggguauauaguggcuuuccauugagguuuucacucuuugaaggaggucauuuauaccaaugag

SEQ ID NO: 2067 - RNA, 22 nt, Homo sapiens
ugggguggggagguauggugag

SEQ ID NO: 2068 - RNA, 100 nt, Homo sapiens
ccacucccugaccugugucccccuuuaccaccucguagguucauggccucuuucuucagaggcaugggguggggagguauggugagcagguuagggaggg

SEQ ID NO: 2069 - RNA, 22 nt, Homo sapiens
uggugacagggaugugguggug

SEQ ID NO: 2070 - RNA, 66 nt, Homo sapiens
uggugacagggauguggugguggaggcuucugccucuagcuuucuaauccucccauucuuguccca

SEQ ID NO: 2071 - RNA, 22 nt, Homo sapiens
uguuuuccaggaugggguccuu

SEQ ID NO: 2072 - RNA, 72 nt, Homo sapiens
aaagucauguuuuccaggaugggguccuugguggaaagcucugcuaggaagccuuuuggaaaaugugauuuu

SEQ ID NO: 2073 - RNA, 22 nt, Homo sapiens
uguccucugcagugggacgggg

SEQ ID NO: 2074 - RNA, 77 nt, Homo sapiens
cugcccauguccucugcagugggacggggggcagcugauccugcugguugucccauugcagagccuggucucugcag

SEQ ID NO: 2075 - RNA, 22 nt, Homo sapiens
ugucuguccucucauaggauca

SEQ ID NO: 2076 - RNA, 65 nt, Homo sapiens
ucaugucuguccucucauaggaucacgagacuaucacauggaucccacagagaagacaggcaaga

SEQ ID NO: 2077 - RNA, 22 nt, Homo sapiens
ugugguuagaaauuaggagaau

SEQ ID NO: 2078 - RNA, 95 nt, Homo sapiens
aagugggagacagcaugugguuagaaauuaggagaauugacaugauguccuauucugcuauuuuuuagccauaagcaagcccugucaccucacuu

SEQ ID NO: 2079 - RNA, 22 nt, Homo sapiens
uguuaguccuagaagccacgga

SEQ ID NO: 2080 - RNA, 77 nt, Homo sapiens
gcuuggccauguuaguccuagaagccacggagaaggacccuucugauuggcuuucaggacuuaucuaacugcuaagu

SEQ ID NO: 2081 - RNA, 22 nt, Homo sapiens
uugaaaugggggugccuggggu

SEQ ID NO: 2082 - RNA, 80 nt, Homo sapiens
cccauaaucuucuuccccagcacaucucuccauuuuucauguuguuuuccggucauugaaaugggggugccugggguggg

SEQ ID NO: 2083 - RNA, 22 nt, Homo sapiens
acgccauuaucacacuaaauag

SEQ ID NO: 2084 - RNA, 85 nt, Homo sapiens
ccuuagcagagcuguggagugugacaaugguguuugugucuaaacuaucaaacgccauuaucacacuaaauagcuacugcuaggc

SEQ ID NO: 2085 - RNA, 15 nt, Homo sapiens
uugaauguaagcucc

SEQ ID NO: 2086 - RNA, 67 nt, Homo sapiens
ggaguucuacauuuguugaugauuauguacagacugaugucugucugccccauugaauguaagcucc

SEQ ID NO: 2087 - RNA, 22 nt, Homo sapiens
uuguggcggccucugacaucac

SEQ ID NO: 2088 - RNA, 68 nt, Homo sapiens
gguccauuguggcggccucugacaucacagcagggggcagcgugaugucacagggccccauuguggcu

SEQ ID NO: 2089 - RNA, 22 nt, Homo sapiens
uucuagugggggguagauguca

SEQ ID NO: 2090 - RNA, 76 nt, Homo sapiens
cugaggacauucuagugggggguagaugucacaucgucauauuucucuggcucuaccaccacuagaagaaccucag

SEQ ID NO: 2091 - RNA, 22 nt, Homo sapiens
uucugcagaggcggcacacagu

SEQ ID NO: 2092 - RNA, 75 nt, Homo sapiens
uucugcagaggcggcacacagugaaugaggagauacagacagaugccuucagauggagcugugugcucugcagaa

SEQ ID NO: 2093 - RNA, 22 nt, Homo sapiens
aauggauuuguaggaggaaggg

SEQ ID NO: 2094 - RNA, 73 nt, Homo sapiens
ggagaaaauggauuuguaggaggaagggauaaauaaaaguucucugucccuuuucuacaaauuuuaaauaucc

SEQ ID NO: 2095 - RNA, 22 nt, Homo sapiens
uuucuuaucugcaggaggcauc

SEQ ID NO: 2096 - RNA, 65 nt, Homo sapiens
uuucuuaucugcaggaggcauccacuguaauacaagaaagagaagagucuccaugcagaaggaag

SEQ ID NO: 2097 - RNA, 22 nt, Homo sapiens
uuugaggaacagcuggggugga

SEQ ID NO: 2098 - RNA, 67 nt, Homo sapiens
ucauuugaggaacagcugggguggaaugaaucacauuugguuugggccucagcauuuccacagauga

SEQ ID NO: 2099 - RNA, 22 nt, Homo sapiens
uuuaugugugcaaauaggguaa

SEQ ID NO: 2100 - RNA, 86 nt, Homo sapiens
gcaggaacaccccucauuuaugugugcaaauaggguaauuaaguguccaauuaccagauuugcauuggcaaaugggggcuuugugu

SEQ ID NO: 2101 - RNA, 22 nt, Homo sapiens
aagggggauggugguggugagg

SEQ ID NO: 2102 - RNA, 86 nt, Homo sapiens
gugaggaggcccaagggggauggugguggugaggaagccgagaggacuuggccauucaccagcuccucagggaaagcacugcucac

SEQ ID NO: 2103 - RNA, 22 nt, Homo sapiens
aaugagcagugggugggugagg

SEQ ID NO: 2104 - RNA, 147 nt, Homo sapiens
gcaaaguuuucggcuagcccucacuaucucucaaccccccuuccuccacuucccugcuguucuuucuuggcacacaaaauauaggccaaugagcagugggugggugaggaggaugugagagaaaauuugagaaguaaaaaaaggagc

SEQ ID NO: 2105 - RNA, 22 nt, Homo sapiens
acagccucaugcccgcucagaa

SEQ ID NO: 2106 - RNA, 72 nt, Homo sapiens
ggucucugagcaggcgggaggccuggcacucacucagcaucacccacagccucaugcccgcucagaaaggcc

SEQ ID NO: 2107 - RNA, 22 nt, Homo sapiens
aggaagcaaaguauuugggggg

SEQ ID NO: 2108 - RNA, 78 nt, Homo sapiens
guuaccccaggaagcaaaguauuuggggggcaucauuaaacauuuugcccuauggucuuuuguuuucugggggcagac

SEQ ID NO: 2109 - RNA, 22 nt, Homo sapiens
aggaaguggcugggcuggguug

SEQ ID NO: 2110 - RNA, 80 nt, Homo sapiens
ucagcgugccaggaaguggcugggcuggguugguggucuaucuuacgcccaggcucgcuccgucacuuccacaucgcuga

SEQ ID NO: 2111 - RNA, 22 nt, Homo sapiens
uccuugaggaugaggauggggc

SEQ ID NO: 2112 - RNA, 66 nt, Homo sapiens
gucuccuugaggaugaggauggggcgggcgauguggucggcgcugcacuccaccucguccugagac

SEQ ID NO: 2113 - RNA, 22 nt, Homo sapiens
acuagauugugagcuccuggag

SEQ ID NO: 2114 - RNA, 86 nt, Homo sapiens; identical to SEQ ID NO: 872

SEQ ID NO: 2115 - RNA, 22 nt, Homo sapiens
aggcgggcugugcagauguuau

SEQ ID NO: 2116 - RNA, 82 nt, Homo sapiens
ccugccucccaggcgggcugugcagauguuaucaugggcaugagcugacucacccuugcgacaucuaagcccgcugggcagg

SEQ ID NO: 2117 - RNA, 22 nt, Homo sapiens
agcuacuucuaaaccuaaacag

SEQ ID NO: 2118 - RNA, 76 nt, Homo sapiens
aaggcuuccagcuacuucuaaaccuaaacaguuaugaguauguugcuggcuagaccuagaauuagucagaagcuuu

SEQ ID NO: 2119 - RNA, 22 nt, Homo sapiens
agcucgcgggugacgggugugg

SEQ ID NO: 2120 - RNA, 86 nt, Homo sapiens
aggagccuccccagcucgcgggugacgggugugguuuguaaauaguuuaugcaccuguuacauccacguguugcgggacugcuccu

SEQ ID NO: 2121 - RNA, 22 nt, Homo sapiens
aggaaaaggccagggugcgggg

SEQ ID NO: 2122 - RNA, 90 nt, Homo sapiens
aagucccugacacccuucuuuccugugugccuuaggugguagucggccacaacacaaccgccagccaggaaaaggccagggugcggggau

SEQ ID NO: 2123 - RNA, 22 nt, Homo sapiens
aggcagggugcaggagccuugg

SEQ ID NO: 2124 - RNA, 79 nt, Homo sapiens
cugccuuccaggcagggugcaggagccuuggagaaggugcuagaagcugggguuccugugccaagggcugggaaggcag

SEQ ID NO: 2125 - RNA, 22 nt, Homo sapiens
aggggcuggguagcucugaagg

SEQ ID NO: 2126 - RNA, 63 nt, Homo sapiens
gccaggggcuggguagcucugaaggaagcauuaggcuucagcaagucaccucacagcccuggc

SEQ ID NO: 2127 - RNA, 22 nt, Homo sapiens
uguuauuccccuugcuguggug

SEQ ID NO: 2128 - RNA, 67 nt, Homo sapiens
gucaaucacgccaggaggaaaaauaguggcaugauuuguuaucuguuauuccccuugcuguggugac

SEQ ID NO: 2129 - RNA, 22 nt, Homo sapiens
auaggguuccagaggaaaggaa

SEQ ID NO: 2130 - RNA, 80 nt, Homo sapiens
auccuccuacuuuccuuuugggaucuugauggugccuauucagggaguccauaggguuccagaggaaaggaaggaaggau

SEQ ID NO: 2131 - RNA, 22 nt, Homo sapiens
aggugggggugagaaaacagac

SEQ ID NO: 2132 - RNA, 79 nt, Homo sapiens
aggagaacaucugugcucuuuauccucaucuggauuuagcaaccauaccaggugggggugagaaaacagacacacuccu

SEQ ID NO: 2133 - RNA, 22 nt, Homo sapiens
accagggggaggaggguguugg

SEQ ID NO: 2134 - RNA, 66 nt, Homo sapiens
aaaccagggggaggaggguguuggguggagaugaaguugcucuugacucuccuucccauggcuguu

SEQ ID NO: 2135 - RNA, 18 nt, Homo sapiens
aguuggcggggugauggg

SEQ ID NO: 2136 - RNA, 78 nt, Homo sapiens
cucauuaccugccagcuggccucuucccacaugccccccucauccugaccuguggguaccaguuggcggggugauggg

SEQ ID NO: 2137 - RNA, 22 nt, Homo sapiens
auguggguaccucugaaagggg

SEQ ID NO: 2138 - RNA, 65 nt, Homo sapiens
gggccccuucgugugccuaccugguuaugugcuuguccccauguggguaccucugaaaggggcuu

SEQ ID NO: 2139 - RNA, 22 nt, Homo sapiens
auuuugccaguuguucagagaa

SEQ ID NO: 2140 - RNA, 82 nt, Homo sapiens
uuuucucucuggaggcaauugggacuauaggagcagcugcaacagcagcauuugccauuuugccaguuguucagagaaugaa

SEQ ID NO: 2141 - RNA, 22 nt, Homo sapiens
caaauuuagguaacagucugua

SEQ ID NO: 2142 - RNA, 119 nt, Homo sapiens
acugaucuacuccuucauuaauaucccaaauuuagguaacagucuguagagugugccaguuaguacagccuguuaccuauauuugggauaugaauauauuauccaaggaguagaacagu

SEQ ID NO: 2143 - RNA, 22 nt, Homo sapiens
acucaugccaagaaaugauccu

SEQ ID NO: 2144 - RNA, 71 nt, Homo sapiens
agauaaacucaugccaagaaaugauccuggaaauauauuucagacugaugguuucuggucugaguuuaucu

SEQ ID NO: 2145 - RNA, 22 nt, Homo sapiens
caucuguggaagugggagagaa

SEQ ID NO: 2146 - RNA, 56 nt, Homo sapiens
caucuguggaagugggagagaaaaauaauacuuucucugccuacuucacagagaug

SEQ ID NO: 2147 - RNA, 22 nt, Homo sapiens
ugaguuaaaaagggggguguca

SEQ ID NO: 2148 - RNA, 121 nt, Homo sapiens; identical to SEQ ID NO: 1826

SEQ ID NO: 2149 - RNA, 22 nt, Homo sapiens
ccuaggcccuaggcuuccauca

SEQ ID NO: 2150 - RNA, 111 nt, Homo sapiens
ccuuccuaugccagcugauccccuaggcccuaggcuuccaucauaucacugagcaaagcacagggcaguuugagugggggucagaggccuggggggucuuuggcuggaagg

SEQ ID NO: 2151 - RNA, 22 nt, Homo sapiens
ugauguccugggggguugggac

SEQ ID NO: 2152 - RNA, 70 nt, Homo sapiens
gcaugauguccugggggguugggacccggaaaaaagucucacugcucaccagccccccaggaaacuccgc

SEQ ID NO: 2153 - RNA, 22 nt, Homo sapiens
ugaggugcagugcugcaucucu

SEQ ID NO: 2154 - RNA, 106 nt, Homo sapiens
gcgcagcgcccugucucccagccugaggugcagugcugcaucucuggucaguugggagucugagaugaagcacuguagcucaggaagagagaaguuguucugcagc

SEQ ID NO: 2155 - RNA, 22 nt, Homo sapiens
cucaggcagugguauggauggg

SEQ ID NO: 2156 - RNA, 78 nt, Homo sapiens
cuggcccuucuaaccauacacauuguuuccgggaggcuaaauauaaccccucaggcagugguauggauggguggccag

SEQ ID NO: 2157 - RNA, 22 nt, Homo sapiens
uauguaacaugguccacuaacu

SEQ ID NO: 2158 - RNA, 67 nt, Homo sapiens
agagaugguagacuauggaacguaggcguuaugauuucugaccuauguaacaugguccacuaacucu

SEQ ID NO: 2159 - RNA, 21 nt, Homo sapiens
ucacaguggucucugggauua

SEQ ID NO: 2160 - RNA, 110 nt, Homo sapiens
gauggcugugaguuggcuuaaucucagcuggcaacugugagauguucauacaaucccucacaguggucucugggauuaugcuaaacagagcaauuuccuagcccucacga

SEQ ID NO: 2161 - RNA, 22 nt, Homo sapiens
ugcaguccaugggcauauacac

SEQ ID NO: 2162 - RNA, 96 nt, Homo sapiens
ucccuggcgugaggguaugugccuuuggacuacaucguggaagccagcaccaugcaguccaugggcauauacacuugccucaaggccuaugucauc

SEQ ID NO: 2163 - RNA, 22 nt, Homo sapiens
uacuccagagggcgucacucau

SEQ ID NO: 2164 - RNA, 115 nt, Homo sapiens
ccaccuucagcugaguguagugcccuacuccagagggcgucacucauguaaacuaaaacaugauuguagccuuuuggaguagaguaauacacaucacguaacgcauauuuggugg

SEQ ID NO: 2165 - RNA, 22 nt, Homo sapiens
uacugcagacaguggcaaucau

SEQ ID NO: 2166 - RNA, 94 nt, Homo sapiens
caugcugugugugguacccuacugcagacaguggcaaucauguauaauuaaaaaugauugguacgucuguggguagaguacugcaugacacaug

SEQ ID NO: 2167 - RNA, 17 nt, Homo sapiens
ucccagcggugccucca

SEQ ID NO: 2168 - RNA, 102 nt, Homo sapiens
uccucccagcggugccuccaccucacgccccagugcugccgggcccaauuucugauaaaggcagugauccuggggaggaaaugggcagcgauuuggggagga

SEQ ID NO: 2169 - RNA, 22 nt, Homo sapiens
gcaggagguagcgcacagccau

SEQ ID NO: 2170 - RNA, 60 nt, Homo sapiens
uguggccaucgcugcccccucgcccagccugggguccgcaggagguagcgcacagccaua

SEQ ID NO: 2171 - RNA, 22 nt, Homo sapiens
cuuggcacugcgugaccuuggg

SEQ ID NO: 2172 - RNA, 85 nt, Homo sapiens
ggcacaggccgugggccgcggcgcgcgggcucgggucugacucagucccuuggcacugcgugaccuugggccugcugccugugcc

SEQ ID NO: 2173 - RNA, 22 nt, Homo sapiens
uacagggagacggcagucccag

SEQ ID NO: 2174 - RNA, 78 nt, Homo sapiens
gcugggguaccuacagggagacggcagucccaggacugcuggggccuggggcugaccuuuccucuggccggccccagc

SEQ ID NO: 2175 - RNA, 22 nt, Homo sapiens
uaaacuggcagagugcaaacaa

SEQ ID NO: 2176 - RNA, 105 nt, Homo sapiens
uuauaauaaauuaaaugccuaaacuggcagagugcaaacaauuuugacucagaucuaaauguuugcacuggcuguuuaaacauuuaauuuguuagaauggaagua

SEQ ID NO: 2177 - RNA, 22 nt, Homo sapiens
uacaggagcaggugggacccca

SEQ ID NO: 2178 - RNA, 79 nt, Homo sapiens
gcucugccuacaggagcaggugggaccccagagccugcauggacagucaguggggucccagccugcccugcuggcaugc

SEQ ID NO: 2179 - RNA, 22 nt, Homo sapiens
uaccugagacccgguccaggag

SEQ ID NO: 2180 - RNA, 69 nt, Homo sapiens; identical to SEQ ID NO: 396

SEQ ID NO: 2181 - RNA, 22 nt, Homo sapiens
ugccucuugggaggagaggccu

SEQ ID NO: 2182 - RNA, 70 nt, Homo sapiens
cagaggaaacuguccuuccuagaggugugcagggugaaucucucaugccucuugggaggagaggccugug

SEQ ID NO: 2183 - RNA, 22 nt, Homo sapiens
uacuuggaaaggcaucaguugc

SEQ ID NO: 2184 - RNA, 81 nt, Homo sapiens
gugggaagugcccuacuuggaaaggcaucaguugcuuagauuacauguaacuauucccuuucugaguagaguaagucuuac

SEQ ID NO: 2185 - RNA, 22 nt, Homo sapiens
uagaaaauccaggucuuggaau

SEQ ID NO: 2186 - RNA, 62 nt, Homo sapiens
gccauuuauggggcuuggauuggggccaaacgcugcccuagaaaauccaggucuuggaaugc

SEQ ID NO: 2187 - RNA, 22 nt, Homo sapiens
uagagaggccggugggagaugc

SEQ ID NO: 2188 - RNA, 111 nt, Homo sapiens
ggcuaccaguaagcacagucccuccuagagaggccggugggagaugccuuggucaugcccgucagcaucuccuucccacuucuuaggagcugaguggcuuccugggcggcc

SEQ ID NO: 2189 - RNA, 22 nt, Homo sapiens
ucagaggccaucuggggagcag

SEQ ID NO: 2190 - RNA, 72 nt, Homo sapiens
ggccucagaggccaucuggggagcagucgucccagcgggcggcagggcccccuccaggcugccuuugaggcc

SEQ ID NO: 2191 - RNA, 22 nt, Homo sapiens
ucagguggccaggugcauaucu

SEQ ID NO: 2192 - RNA, 90 nt, Homo sapiens
uucucuuuccucagguggccaggugcauaucuugugugaggaccuucacuguaucugggaaugccuacugguuaccucgguaacagagaa

SEQ ID NO: 2193 - RNA, 22 nt, Homo sapiens
ucagguuauugguggggguaag

SEQ ID NO: 2194 - RNA, 104 nt, Homo sapiens
uggcaguuuauguuuuugaggcucacucuacacagauagaauggggacugcuggcagugccucagguuauugguggggguaagaaagggcauuucucucugcca

SEQ ID NO: 2195 - RNA, 22 nt, Homo sapiens
ucgggugcgggacagagguugg

SEQ ID NO: 2196 - RNA, 70 nt, Homo sapiens
gcccucgggugcgggacagagguuggaaugggcuccuccuuuugacuuugagugugugugccugggaggu

SEQ ID NO: 2197 - RNA, 22 nt, Homo sapiens
ucucuaauccuugcuaccuggg

SEQ ID NO: 2198 - RNA, 84 nt, Homo sapiens
gcucccccucucuaauccuugcuaccugggugagagugcugucugaaugcaaugcaccugggcaaggauucugagagcgagagc

SEQ ID NO: 2199 - RNA, 22 nt, Homo sapiens
uguggacucaguucuggugccc

SEQ ID NO: 2200 - RNA, 73 nt, Homo sapiens
ccuggcacugagaacugaauuccauaggcugugagcucuagcaaugcccuguggacucaguucuggugcccgg

SEQ ID NO: 2201 - RNA, 22 nt, Homo sapiens
ugagaaagaggguuugaugguc

SEQ ID NO: 2202 - RNA, 101 nt, Homo sapiens
uggauucaagagaucaccaucaucagacuggcucaguuucucagugccucaauugcagaugccugagaaagaggguuugauggucuuuggucuggagucca

SEQ ID NO: 2203 - RNA, 22 nt, Homo sapiens
ugagagagggaaaagcagaauu

SEQ ID NO: 2204 - RNA, 86 nt, Homo sapiens
agcaugcgaguaguuuguuauuauuuuucuuuuuuaggauugauucuacauaaccugagagagggaaaagcagaauuacuguugcu

SEQ ID NO: 2205 - RNA, 22 nt, Homo sapiens
ugagauugaacaucagcaggcg

SEQ ID NO: 2206 - RNA, 71 nt, Homo sapiens
gagacccugagauugaacaucagcaggcgagggggucccucuucccugcucuguucuggucucagaggcuu

SEQ ID NO: 2207 - RNA, 22 nt, Homo sapiens
ugagcagucugggggacucuug

SEQ ID NO: 2208 - RNA, 121 nt, Homo sapiens
guguguguggaggggaggugggaggucauaccugagcagucugggggacucuugcucaggggacaggaagaguguucuagaaacugcucuuguuauacccccgcuccaccaaaauacauac

SEQ ID NO: 2209 - RNA, 22 nt, Homo sapiens
ugaggauuaaugaucaacugga

SEQ ID NO: 2210 - RNA, 84 nt, Homo sapiens
auuuccugaggauuaaugaucaacuggaagagcuugugguccugggaccauuaacuccauguggucauuaauuuuguuggaaau

SEQ ID NO: 2211 - RNA, 22 nt, Homo sapiens
ugaggugccggcuggaguuucu

SEQ ID NO: 2212 - RNA, 70 nt, Homo sapiens
gccugaggugccggcuggaguuucugcuggccuggcuugcaaaaugcauuccggugggcaccagaaaggc

SEQ ID NO: 2213 - RNA, 22 nt, Homo sapiens
ugaggugugggugguugguuuc

SEQ ID NO: 2214 - RNA, 78 nt, Homo sapiens
gaauauuccugaggugugggugguugguuuccuuacaagguaggguuugcaagcuccuuacauccacaggggcuguuu

SEQ ID NO: 2215 - RNA, 21 nt, Homo sapiens
ugcacuugccagauaaguagc

SEQ ID NO: 2216 - RNA, 62 nt, Homo sapiens
guuacauauguuuggcagaguucaggccaacaccuggguccugcacuugccagauaaguagc

SEQ ID NO: 2217 - RNA, 22 nt, Homo sapiens
uggcagagggcagggccaggau

SEQ ID NO: 2218 - RNA, 73 nt, Homo sapiens
acugccuggcagagggcagggccaggauucaaagucacaucucugacuccugcugcccgcccucuggggcagu

SEQ ID NO: 2219 - RNA, 19 nt, Homo sapiens
uggcgauauaaccaugugc

SEQ ID NO: 2220 - RNA, 75 nt, Homo sapiens
gcacaggguuauaucgccaguaagugucagagcuaugauuuaaauccagauaauccuggcgauauaaccaugugc

SEQ ID NO: 2221 - RNA, 22 nt, Homo sapiens
uggcuggcucggaagggacugc

SEQ ID NO: 2222 - RNA, 89 nt, Homo sapiens
ggcccggcagugggggccuggcuggcucggaagggacugcaggugagaugcugggugggacucuagggccagcccugcccucccgggcc

SEQ ID NO: 2223 - RNA, 22 nt, Homo sapiens
uggcucacuucccaggcggugg

SEQ ID NO: 2224 - RNA, 133 nt, Homo sapiens
cuuggacuguggaugcagaagaccuggguucaaauccugccuggcucacuucccaggcgguggcuccagacaagucacuuggggagcaccguugggaggugagggcgagcccacaaacaugcauagcuucagg

SEQ ID NO: 2225 - RNA, 22 nt, Homo sapiens
ugggaaggggaagguccucucc

SEQ ID NO: 2226 - RNA, 141 nt, Homo sapiens
gggcaggggguuauggggggcauuggggcauggucugccugggaaggggaagguccucuccagcccccaggccucaguggaguagucggcucccuccuuucugcagccaugccucagauucuagugucccuugccccgccc

SEQ ID NO: 2227 - RNA, 22 nt, Homo sapiens
uugaugcuuaggaaaucugugg

SEQ ID NO: 2228 - RNA, 78 nt, Homo sapiens
gauucauuccacagaguuccccagcaucaaucagugcuuggcccaagauugaugcuuaggaaaucugugggaugaauu

SEQ ID NO: 2229 - RNA, 22 nt, Homo sapiens
ugggagagugucuggaggccug

SEQ ID NO: 2230 - RNA, 73 nt, Homo sapiens
ccaggccuccaggugcugccaccacuucagagcaggggaccgacagucccugggagagugucuggaggccugg

SEQ ID NO: 2231 - RNA, 22 nt, Homo sapiens
ugggcacaggugcacacacagg

SEQ ID NO: 2232 - RNA, 84 nt, Homo sapiens
cuguguaccugggcacaggugcacacacaggaguaaacaggcaccugcauggacccuguguguacaccuaaccuacacacacag

SEQ ID NO: 2233 - RNA, 22 nt, Homo sapiens
ugggcucagggcaggggaaaug

SEQ ID NO: 2234 - RNA, 111 nt, Homo sapiens
gaugcccuuagcaguggggcuccugggcucagggcaggggaaauguacccugaagggggaaguuucccuucuaagagcugacggagccacuuaaccacggcaaggaacauc

SEQ ID NO: 2235 - RNA, 22 nt, Homo sapiens
ugggggaggaggucagugaggc

SEQ ID NO: 2236 - RNA, 92 nt, Homo sapiens
uguucagccugggggaggaggucagugaggccuuccccucgagggguuuagccucugauuuuucacuugccucauucugcccauucucagca

SEQ ID NO: 2237 - RNA, 22 nt, Homo sapiens
uggggggcugggagaguaaaag

SEQ ID NO: 2238 - RNA, 78 nt, Homo sapiens
cagguccuggggggcugggagaguaaaaggcagggucuccuguggauuccuuuugcugcccaggccucuugguuccug

SEQ ID NO: 2239 - RNA, 22 nt, Homo sapiens
ugggucuaggugcugugggagg

SEQ ID NO: 2240 - RNA, 83 nt, Homo sapiens
cugggcgggccucugagcagcagcccugcacucgggcucaccauagugcccugggucuaggugcugugggaggcccugcccgg

SEQ ID NO: 2241 - RNA, 22 nt, Homo sapiens
gcuauuucacgacaccaggguu

SEQ ID NO: 2242 - RNA, 84 nt, Homo sapiens
cguugcugcagcugguguugugaaucaggccgacgagcagcgcauccucuuacccggcuauuucacgacaccaggguugcauca

SEQ ID NO: 2243 - RNA, 22 nt, Homo sapiens
ugguguggugggggugggcagu

SEQ ID NO: 2244 - RNA, 115 nt, Homo sapiens
cuuguuggcacuggagcggggccugguguggugggggugggcaguggugagggggcaggggcuggcacagacauugcuggccccagaaugcugaggcccauucuuugccaggggg

SEQ ID NO: 2245 - RNA, 22 nt, Homo sapiens
uguuuggcauuaggggugggag

SEQ ID NO: 2246 - RNA, 81 nt, Homo sapiens
ccuggccuguuuggcauuaggggugggaguuggccaaucccugcuuugauguugcuucugcuccagaugccaggggucugg

SEQ ID NO: 2247 - RNA, 22 nt, Homo sapiens
uguggagauggcagaagccagc

SEQ ID NO: 2248 - RNA, 149 nt, Homo sapiens
gcacagcaauggggccaagagacuggggugggauccaugugguaucugguaucugucaucuucugcagcacuuacauucuuccuguggagauggcagaagccagcauuuuugugucucauuuaauccaucuggccucuccauguugugu

SEQ ID NO: 2249 - RNA, 22 nt, Homo sapiens
uuacuucaggggagguuuguga

SEQ ID NO: 2250 - RNA, 124 nt, Homo sapiens
acuguuaaggagguuaaucucuguucuccuugcuuacccucccugcaguaagguuggugcccccucuccuuacuucaggggagguuugugagagggcugacagcagaagccuucuggagccagu

SEQ ID NO: 2251 - RNA, 22 nt, Homo sapiens
uucccacgggucaggggcugag

SEQ ID NO: 2252 - RNA, 114 nt, Homo sapiens
ugacgcacacugucccaccuaauucgcccagcccagcccgcugggaggugggugccgugguucccuucccacgggucaggggcugaggcucagagaggugaaaugacuugcuca

SEQ ID NO: 2253 - RNA, 22 nt, Homo sapiens
uugcauugugguugcagucaau

SEQ ID NO: 2254 - RNA, 90 nt, Homo sapiens
uugcauugucauccccuugcauugugguugcagucaaugaaaguuagaaauaauugauugcagcugcauggcuauuuaauggcaaugcaa

SEQ ID NO: 2255 - RNA, 22 nt, Homo sapiens
uugggggucugugacuuugggg

SEQ ID NO: 2256 - RNA, 69 nt, Homo sapiens
gcccuucgggaagccagaggccccaugggaaggagugccuagccuugggggucugugacuuuggggggu

SEQ ID NO: 2257 - RNA, 22 nt, Homo sapiens
uuguagagacaggaccugagga

SEQ ID NO: 2258 - RNA, 104 nt, Homo sapiens
aguuacagcaauggggccuuguagagacaggaccugaggaagcuggcgcugccuccuuagaccuguuucucugccagaaaugccuccauuuccagcugucaacu

SEQ ID NO: 2259 - RNA, 22 nt, Homo sapiens
uuucagaagaaaagaccgggau

SEQ ID NO: 2260 - RNA, 66 nt, Homo sapiens
ugcugaucucaacuuuucacuggggaccacuaagaagccuuucagaagaaaagaccgggaucagca

SEQ ID NO: 2261 - RNA, 22 nt, Homo sapiens
uuucuugugggcagauggggcc

SEQ ID NO: 2262 - RNA, 80 nt, Homo sapiens
cugggacucccuuucuugugggcagauggggccagauguucaggucaggcuucugccacgagagggaaguggggucccag

SEQ ID NO: 2263 - RNA, 22 nt, Homo sapiens
uuugguccuuccauugguccua

SEQ ID NO: 2264 - RNA, 99 nt, Homo sapiens; identical to SEQ ID NO: 152

SEQ ID NO: 2265 - RNA, 22 nt, Homo sapiens
uuugguuuucucuuggcggaag

SEQ ID NO: 2266 - RNA, 68 nt, Homo sapiens
cauagcugccaagggaacuaaaagguuucuuuuaaaugaauucuccuuugguuuucucuuggcggaag

SEQ ID NO: 2267 - RNA, 22 nt, Homo sapiens
uuuugggcuaagugcugauagu

SEQ ID NO: 2268 - RNA, 87 nt, Homo sapiens
cugaagcucucccuuuugggcuaagugcugauaguuucaguuggccuuagugugacuucagcacuuuccagaaggugaggcucccag

SEQ ID NO: 2269 - RNA, 22 nt, Homo sapiens
aaaagaagcacggcuccgggga

SEQ ID NO: 2270 - RNA, 69 nt, Homo sapiens
gaaaagaagcacggcuccggggacuggcgccugcuuggagaccugcuccccgaagccgugcgcuucuuc

SEQ ID NO: 2271 - RNA, 22 nt, Homo sapiens
aagggcaggaggguuggacaug

SEQ ID NO: 2272 - RNA, 70 nt, Homo sapiens
aggcgaagggcaggaggguuggacaugaagccacaaagcuacucggguuccuccuucuucucuuuugccu

SEQ ID NO: 2273 - RNA, 22 nt, Homo sapiens
aaguguaugguguagcuggugu

SEQ ID NO: 2274 - RNA, 116 nt, Homo sapiens
caagccauuacaacauuuccaguaaggcgaaguguaugguguagcugguguaccaugcacuuaaacuuaccaguuauaacguacacuaugccuuauuggcaaugcuguauggcuug

SEQ ID NO: 2275 - RNA, 22 nt, Homo sapiens
cgugcaggggaagucuggagaa

SEQ ID NO: 2276 - RNA, 67 nt, Homo sapiens
gcuuuccucggauucccggaugugggugaguucauuugcucgcgugcaggggaagucuggagaaggc

SEQ ID NO: 2277 - RNA, 22 nt, Homo sapiens
auggcccaaggguggagaggaa

SEQ ID NO: 2278 - RNA, 68 nt, Homo sapiens
ggcauuccccuuuacccauggagcucacugcagugugcagcgauggcccaaggguggagaggaagguc

SEQ ID NO: 2279 - RNA, 22 nt, Homo sapiens
caaacagcugggucggcagcug

SEQ ID NO: 2280 - RNA, 78 nt, Homo sapiens
gccccagcugcccgccagcugugagcgcccgucgggcccggaggucacccgcaaacagcugggucggcagcugggagc

SEQ ID NO: 2281 - RNA, 22 nt, Homo sapiens
cgggcgggugggugguucaaau

SEQ ID NO: 2282 - RNA, 109 nt, Homo sapiens
ggcuuccaguuggggggccauaugcugucuuuaaucugccugugcaauucucaccgaugucaauaggcgcgggcgggugggugguucaaauggcccgagagcugggacu

SEQ ID NO: 2283 - RNA, 22 nt, Homo sapiens
gagguaugggugagagagaggc

SEQ ID NO: 2284 - RNA, 85 nt, Homo sapiens
agcccugaacggagguaugggugagagagaggcgguggcugagggaggaaagcugucuuuucacuggugccuucuuguuagagcu

SEQ ID NO: 2285 - RNA, 22 nt, Homo sapiens
gggggaguugggaguggagggu

SEQ ID NO: 2286 - RNA, 87 nt, Homo sapiens
cucagaccucggggggaguugggaguggaggguugcugggggacacuuggcuuucucucccacgugccaccuccccucgugucccag

SEQ ID NO: 2287 - RNA, 20 nt, Homo sapiens
gguaccugcacuccagcuuc

SEQ ID NO: 2288 - RNA, 67 nt, Homo sapiens; identical to SEQ ID NO: 1946

SEQ ID NO: 2289 - RNA, 22 nt, Homo sapiens
gugggggucucugagcagguaa

SEQ ID NO: 2290 - RNA, 105 nt, Homo sapiens
ugccuccccacuucuccacacuacuucuccaggagccacuuacuggacaccaacuggcugacggugggggucucugagcagguaauugggauaggagcagaggca

SEQ ID NO: 2291 - RNA, 22 nt, Homo sapiens
guggugguguccugucagaaug

SEQ ID NO: 2292 - RNA, 74 nt, Homo sapiens
uguggucauccuggugggaaauuaucuccucugacaggcucagcgguggugguguccugucagaauggccuaca

SEQ ID NO: 2293 - RNA, 22 nt, Homo sapiens
uaagacuuagggaucggacuua

SEQ ID NO: 2294 - RNA, 72 nt, Homo sapiens
gccuuaaaauugaucccaagguccuuugcacagccccuuuggccguaagacuuagggaucggacuuacuggc

SEQ ID NO: 2295 - RNA, 22 nt, Homo sapiens
uaggcgaacacgguggcgagcc

SEQ ID NO: 2296 - RNA, 72 nt, Homo sapiens
gcacguaggcgaacacgguggcgagccggacccacuucuuguuggucuuggccgccaucuucgccuucuugu

SEQ ID NO: 2297 - RNA, 22 nt, Homo sapiens
uggggggcuccuuccacauuuu

SEQ ID NO: 2298 - RNA, 81 nt, Homo sapiens; identical to SEQ ID NO: 1604

SEQ ID NO: 2299 - RNA, 22 nt, Homo sapiens
ugagugccgggcguggagagcu

SEQ ID NO: 2300 - RNA, 114 nt, Homo sapiens
ucuggaccagggcuguccccugggccgugagugccgggcguggagagcugguguagaugacauuuguagcuccacaugcccuggccugggcgccaaggacagccgcagagaaga

SEQ ID NO: 2301 - RNA, 22 nt, Homo sapiens
ugcuugcauauuuaaggugggg

SEQ ID NO: 2302 - RNA, 109 nt, Homo sapiens
uagcuccuccuugaaauucgugcuugcauauuuaagguggggcucagaaaauaccuuuucuccuccugucccaccuggaagcugugaggcaaacauucugguggugcua

SEQ ID NO: 2303 - RNA, 22 nt, Homo sapiens
uuguggggucgggguccuucgg

SEQ ID NO: 2304 - RNA, 132 nt, Homo sapiens
gggauccugcccugcgauaguccagugcuugaguccgcaguaaggcaaugguccuccaaugcuggaguucacggcguuguggggucgggguccuucggugacuuaguccagggcguaccagggcgggggucc

SEQ ID NO: 2305 - RNA, 22 nt, Homo sapiens
cccccaccccuuucuccuccaa

SEQ ID NO: 2306 - RNA, 88 nt, Homo sapiens
ucucuguuucaccucccccaccccuuucuccuccaaguugggugccuccugcccugcugggugaggaggguggggauugcaaccgaga

SEQ ID NO: 2307 - RNA, 22 nt, Homo sapiens
uuguggggucgggguccuuugg

SEQ ID NO: 2308 - RNA, 132 nt, Homo sapiens
gggauccugcccugcgauaguccagugcuugaguccgcaguaaggcaaugguccuccaaugcuggaguucacggcguuguggggucgggguccuuuggugacuuaguccagggcguaccagggcgggggucc

SEQ ID NO: 2309 - RNA, 22 nt, Homo sapiens
acaugaauagagcagccuggug

SEQ ID NO: 2310 - RNA, 91 nt, Homo sapiens
uguuuuguuuugcaccaggucacuccauucauauauauuacaccagcaauucugccuacaugaauagagcagccuggugcaaaacagaaca

SEQ ID NO: 2311 - RNA, 22 nt, Homo sapiens
agaaaggcauggaggcaaacuu

SEQ ID NO: 2312 - RNA, 69 nt, Homo sapiens
agcuagaaaggcauggaggcaaacuuggucuuaaauucagcacauucauuuugcuucaugucuuuugcu

SEQ ID NO: 2313 - RNA, 22 nt, Homo sapiens
aguggagagagccacagccagg

SEQ ID NO: 2314 - RNA, 55 nt, Homo sapiens
aguggagagagccacagccaggagcuagaaugccuggguucagguuuuuuccacu

SEQ ID NO: 2315 - RNA, 22 nt, Homo sapiens
cacuugugugggugugaaggcg

SEQ ID NO: 2316 - RNA, 69 nt, Homo sapiens
cacuugugugggugugaaggcggggcuucacagagcccccaggugagcugagccacacccacaagagug

SEQ ID NO: 2317 - RNA, 22 nt, Homo sapiens
ugugauuuccaacauugcaaug

SEQ ID NO: 2318 - RNA, 68 nt, Homo sapiens
aauccugugauuuccaacauugcaaugacuaugaauucaggcagauggaauuuggagacuacaggauu

SEQ ID NO: 2319 - RNA, 22 nt, Homo sapiens
cggggccuggugaauuaggacg

SEQ ID NO: 2320 - RNA, 82 nt, Homo sapiens
ucaucucggggccuggugaauuaggacgacaucggcauuuuuuauugcuaaagacguccagauugauccagcccuuggcuga

SEQ ID NO: 2321 - RNA, 22 nt, Homo sapiens
gaugagagugaggaugagaagg

SEQ ID NO: 2322 - RNA, 74 nt, Homo sapiens
cuucuucuucuuccucauccucauccagcuccagcuccagcacugaugagagugaggaugagaaggaagagaag

SEQ ID NO: 2323 - RNA, 22 nt, Homo sapiens
gcugggugaggaggguggggau

SEQ ID NO: 2324 - RNA, 88 nt, Homo sapiens; identical to SEQ ID NO: 2306

SEQ ID NO: 2325 - RNA, 22 nt, Homo sapiens
gggggcuucucuugcugggcug

SEQ ID NO: 2326 - RNA, 84 nt, Homo sapiens
gguaguugcugggggcuucucuugcugggcugguuuagugcuucccugaguaacuggcccgggagcagaggccugaguaaugcc

SEQ ID NO: 2327 - RNA, 22 nt, Homo sapiens
ggucuuguccuuuuuuggcuuc

SEQ ID NO: 2328 - RNA, 72 nt, Homo sapiens
ggucuuguccuuuuuuggcuucucuguacucuggugcacagcucacacuuggcugggagaggacagauggcc

SEQ ID NO: 2329 - RNA, 22 nt, Homo sapiens
gguuuuaggcaggugugauauu

SEQ ID NO: 2330 - RNA, 71 nt, Homo sapiens
gcugguuuuaggcaggugugauauuagcgccugaaacgggaaauaaaucacaccugccuuugaaccccagc

SEQ ID NO: 2331 - RNA, 22 nt, Homo sapiens
guggugggagagcggugggggu

SEQ ID NO: 2332 - RNA, 69 nt, Homo sapiens
uuccuucugcccccuccccaccucagcgcacacacaucccuguggugggagagcgguggggguacggaa

SEQ ID NO: 2333 - RNA, 22 nt, Homo sapiens
ucaaaggguagcccagggaaga

SEQ ID NO: 2334 - RNA, 67 nt, Homo sapiens
ucucuuuuuugauuucccuuugauaguaaauauaaucagaacuucaaaggguagcccagggaagaga

SEQ ID NO: 2335 - RNA, 22 nt, Homo sapiens
uagauggaguaggggcugggcu

SEQ ID NO: 2336 - RNA, 95 nt, Homo sapiens
auuccuaaggcccuuggcugagccccuucucucucuccagguacccaaggaaggcaguucuuagauggaguaggggcugggcugcauggggucuu

SEQ ID NO: 2337 - RNA, 22 nt, Homo sapiens
uagcaaaagaguccagagucug

SEQ ID NO: 2338 - RNA, 89 nt, Homo sapiens
gacccauuuagacacuuagcaaaagaguccagagucugggcaucuuccagagucagacuguggguuccugggcuggguggccugagguc

SEQ ID NO: 2339 - RNA, 22 nt, Homo sapiens
ucaggaugcucacaguccagug

SEQ ID NO: 2340 - RNA, 67 nt, Homo sapiens
gacuucaggaugcucacaguccaguguccaggcagaacugggccauggcugcuggccaucuggaguc

SEQ ID NO: 2341 - RNA, 22 nt, Homo sapiens
uccuauuuugcuggggagagcu

SEQ ID NO: 2342 - RNA, 85 nt, Homo sapiens
agauucaggcucaggacccagugagagaaggagacagguccuaaauugcuaucacuuccuauuuugcuggggagagcucuaaucu

SEQ ID NO: 2343 - RNA, 22 nt, Homo sapiens
ucuggauagagagucaguggug

SEQ ID NO: 2344 - RNA, 79 nt, Homo sapiens
uuggcccacagugacuauucuaucaggaagggaaggauccaguuuuauuuucuucuggauagagagucaguggugccag

SEQ ID NO: 2345 - RNA, 22 nt, Homo sapiens
ucugguaaccuuuaucccuccu

SEQ ID NO: 2346 - RNA, 66 nt, Homo sapiens
gaggagggguaggcaggagccaggcugaggauuuagcaccucuucugguaaccuuuaucccuccuc

SEQ ID NO: 2347 - RNA, 22 nt, Homo sapiens
ugcuggagaggccaguuacggg

SEQ ID NO: 2348 - RNA, 66 nt, Homo sapiens
ugucacugugucugguccacaguaggaauuuaacacauacuugcuggagaggccaguuacggggca

SEQ ID NO: 2349 - RNA, 22 nt, Homo sapiens
ugcugugaucaggagugacccc

SEQ ID NO: 2350 - RNA, 81 nt, Homo sapiens
ggucaugugagacgugcucucugucauggcagggaugaccucgcagaccuugcugugaucaggagugacccccucaugacc

SEQ ID NO: 2351 - RNA, 18 nt, Homo sapiens
ucuuauggggccaggggg

SEQ ID NO: 2352 - RNA, 56 nt, Homo sapiens
ccuccauggcuccaagaaaaacuauuugaaaugucccuucuuauggggccaggggg

SEQ ID NO: 2353 - RNA, 22 nt, Homo sapiens
ugaaagggggucuuggaacagg

SEQ ID NO: 2354 - RNA, 71 nt, Homo sapiens
gggugauuuguucauggccccaucuugguguccagucuggccuugaaagggggucuuggaacagguggccc

SEQ ID NO: 2355 - RNA, 22 nt, Homo sapiens
ugaaucccgagacggggggaug

SEQ ID NO: 2356 - RNA, 65 nt, Homo sapiens
ccccguucccucucggugggagucaagggggaaaagcccuugaaucccgagacggggggaugggg

SEQ ID NO: 2357 - RNA, 22 nt, Homo sapiens
ugagcauuagguguguuucaga

SEQ ID NO: 2358 - RNA, 72 nt, Homo sapiens
ugucuacugaagcaugcuuauaugucuugugucuucugcugcacuugagcauuagguguguuucagaggaua

SEQ ID NO: 2359 - RNA, 22 nt, Homo sapiens
ugcuuagcagugcuaggaagga

SEQ ID NO: 2360 - RNA, 101 nt, Homo sapiens
ccuuccuuuucucugccuuccuucccagcacugcuaagcaaagcugucacucccugugucuugcuuagcagugcuaggaaggaaaggaggaaaaggacugg

SEQ ID NO: 2361 - RNA, 18 nt, Homo sapiens
uggggcuugggcuggaug

SEQ ID NO: 2362 - RNA, 56 nt, Homo sapiens
cuuggcccaggucccagagagucugguugguguguacuuggggcuugggcuggaug

SEQ ID NO: 2363 - RNA, 22 nt, Homo sapiens
uguacuuuuccuaguuucagga

SEQ ID NO: 2364 - RNA, 108 nt, Homo sapiens
uugcaaaccuucagggucccagaauggggagagugcagugcuuucucacuugucaaaguuccuuccuuguacuuuuccuaguuucaggaugaccuuggggugcggcaa

SEQ ID NO: 2365 - RNA, 22 nt, Homo sapiens
ugugcagcaacucagcuggcuu

SEQ ID NO: 2366 - RNA, 89 nt, Homo sapiens
ggugaaaucagccagccagguccugcaggaaagaucuuccucccaaagaggacacaccccuugugcagcaacucagcuggcuuuuggcc

SEQ ID NO: 2367 - RNA, 22 nt, Homo sapiens
uugguuuguuaguuaauggccc

SEQ ID NO: 2368 - RNA, 104 nt, Homo sapiens
ggucauuacuagcaguuaaugauugguuuguuaguuaauggcccaaggcaaagcugagggcgguuaagacucuaacaaacgaguugugaauuguagcaauggcu

SEQ ID NO: 2369 - RNA, 22 nt, Homo sapiens
uucugugggcggguacaaacac

SEQ ID NO: 2370 - RNA, 97 nt, Homo sapiens
cucucuggaaauauuaucuuucugugggcggguacaaacacauguuuaugagaacaucaucuguagcugucuguggaggggggagugugagguagag

SEQ ID NO: 2371 - RNA, 22 nt, Homo sapiens
uugaccugaauucucgggauuu

SEQ ID NO: 2372 - RNA, 122 nt, Homo sapiens
agccaguagcugcacugcagcccauagauucugaggauucuacaaagcaauguguagaaugagaugccuuugaccugaauucucgggauuuuaaaaucugcugacaguagcaguuucuggcu

SEQ ID NO: 2373 - RNA, 22 nt, Homo sapiens
uugaucaaugcaagaugggaag

SEQ ID NO: 2374 - RNA, 104 nt, Homo sapiens
gauuuauguuccuaggcuguucccaucuuacauugaacaaagguuagcccacagagcccaaacuuugaucaaugcaagaugggaagagccucggaacauaaauu

SEQ ID NO: 2375 - RNA, 22 nt, Homo sapiens
uuugaugagaacaucuggggcc

SEQ ID NO: 2376 - RNA, 79 nt, Homo sapiens; identical to SEQ ID NO: 10

SEQ ID NO: 2377 - RNA, 22 nt, Homo sapiens
uuuggggggcuacacggcccuu

SEQ ID NO: 2378 - RNA, 65 nt, Homo sapiens
cuuuuggggggcuacacggcccuuucaauaauuugugagagcauuugugauaggcucuccagaag

SEQ ID NO: 2379 - RNA, 22 nt, Homo sapiens
uuugggguaagggucuaggguu

SEQ ID NO: 2380 - RNA, 113 nt, Homo sapiens
gccaacagaguguaacacugagggccuuuugggguaagggucuaggguuuuaaugagguucuacugacccuagacccucaccccaaaggcccucagugcuacacucuauuggc

SEQ ID NO: 2381 - RNA, 22 nt, Homo sapiens
aaacuugguggugacagcagua

SEQ ID NO: 2382 - RNA, 94 nt, Homo sapiens
ccagguauucugcauguccaaacuugguggugacagcaguagcaaacaacccugagugucccucuguuccugccaauuugaugcuacacccugg

SEQ ID NO: 2383 - RNA, 22 nt, Homo sapiens
uuuuagauagagguggaguaug

SEQ ID NO: 2384 - RNA, 75 nt, Homo sapiens
gaguucucauacuccaccuguaucuaaaaagagucccuccaacuucuuuuuagauagagguggaguaugagacuu

SEQ ID NO: 2385 - RNA, 22 nt, Homo sapiens
uuuucuaggaaaugacagggca

SEQ ID NO: 2386 - RNA, 73 nt, Homo sapiens
cagagcuuuuucuaggaaaugacagggcagguaauugucaucuuuccuucucauauucuuggaaaaaguuuug

SEQ ID NO: 2387 - RNA, 22 nt, Homo sapiens
aacugaggcacggugagaggca

SEQ ID NO: 2388 - RNA, 76 nt, Homo sapiens
ggagaaacugaggcacggugagaggcaggggcuggcugagccuaaggggccucuguacucagugccuccguuuccc

SEQ ID NO: 2389 - RNA, 22 nt, Homo sapiens
agcgggaauggaaggcagggau

SEQ ID NO: 2390 - RNA, 73 nt, Homo sapiens
gagagaagcgggaauggaaggcagggaugaggacugguaacagacccucugccuccuuccuuccucuucccuc

SEQ ID NO: 2391 - RNA, 22 nt, Homo sapiens
aaggggugggggggagggguug

SEQ ID NO: 2392 - RNA, 74 nt, Homo sapiens
gggggaaaggggugggggggagggguugugcggcuggggccucacuuccccuccuuccccuucuccuggucccc

SEQ ID NO: 2393 - RNA, 22 nt, Homo sapiens
aaggcagggugggaggggagua

SEQ ID NO: 2394 - RNA, 105 nt, Homo sapiens
accaacagcuuguucuaauuuaggaaaggcagggugggaggggaguaagggguccccacagggaccuuauuuucuucuaucuugauuucccucaagcuacuuggu

SEQ ID NO: 2395 - RNA, 22 nt, Homo sapiens
aaguucuucuccugcuaauccu

SEQ ID NO: 2396 - RNA, 99 nt, Homo sapiens
ccagcccugccacaucuuuaacagaaaguucuucuccugcuaauccuucugaauccaaagggauuagcagaagaggaacugucaggguggcugggcugg

SEQ ID NO: 2397 - RNA, 22 nt, Homo sapiens
aaugaguugggggguuuuagug

SEQ ID NO: 2398 - RNA, 91 nt, Homo sapiens
gcugcugugaaaugaguugggggguuuuaguguaauucugcuuggacagauaaucaucacacaaaccucccacucaguugucacaauuagc

SEQ ID NO: 2399 - RNA, 22 nt, Homo sapiens
aauggaagguuggugguggagg

SEQ ID NO: 2400 - RNA, 69 nt, Homo sapiens
aauggaagguuggugguggaggacaucccaguccagugcuuuucuuuuuuuugcugcugauuuuucauu

SEQ ID NO: 2401 - RNA, 22 nt, Homo sapiens
aauuguccaggucauuugaugg

SEQ ID NO: 2402 - RNA, 78 nt, Homo sapiens
gaauaggaaauuguccaggucauuugauggagauaggauucaaguggcuaucaaugaccugaagacaugguccuauuc

SEQ ID NO: 2403 - RNA, 22 nt, Homo sapiens
acaaauguauucuguccaagug

SEQ ID NO: 2404 - RNA, 69 nt, Homo sapiens
acaaauguauucuguccaaguggaagccgguuaaguuccgauauccucagcucgacagaacauauuugu

SEQ ID NO: 2405 - RNA, 22 nt, Homo sapiens
acagggucacagcagggcuggg

SEQ ID NO: 2406 - RNA, 89 nt, Homo sapiens
ggcucccgggccccgcccugcuaaggcuugguguauucugggaguccugggaacagggucacagcagggcuggguaguagccggggguu

SEQ ID NO: 2407 - RNA, 22 nt, Homo sapiens
ccacgauacagugggaggcaca

SEQ ID NO: 2408 - RNA, 66 nt, Homo sapiens
ggaccacgauacagugggaggcacaggucugaaaggcucugugcuuccccucugaggugcggaucc

SEQ ID NO: 2409 - RNA, 22 nt, Homo sapiens
caccauggaucuccaggugggu

SEQ ID NO: 2410 - RNA, 128 nt, Homo sapiens
uggaggccuugcugguuuggaaaguucauuguucgacaccauggaucuccaggugggucaaguuuagagaugcaccaaccuggaggacuccaugcuguugagcuguucacaagcagcggacacuucca

SEQ ID NO: 2411 - RNA, 22 nt, Homo sapiens
agccgggaugggaaggcuggga

SEQ ID NO: 2412 - RNA, 69 nt, Homo sapiens
gggaagccgggaugggaaggcugggauuuuguuucagaagucccugguucuguguccaccuggcuuccc

SEQ ID NO: 2413 - RNA, 17 nt, Homo sapiens
aggaacuaggaauggga

SEQ ID NO: 2414 - RNA, 66 nt, Homo sapiens
ucccacuucccuacuuccuuccagcagaucccugaagaaaggaggcagaaggaacuaggaauggga

SEQ ID NO: 2415 - RNA, 22 nt, Homo sapiens
aggaggggaggggagguggaag

SEQ ID NO: 2416 - RNA, 75 nt, Homo sapiens
ggugaaggaggggaggggagguggaagaaggaggagguuagcucaggguucuaccuuaccuucuccucuaucauc

SEQ ID NO: 2417 - RNA, 22 nt, Homo sapiens
aggcagauucuuacggcaguug

SEQ ID NO: 2418 - RNA, 94 nt, Homo sapiens
gagcacaguuugggaaaugcugucagagcugccuucauauuagcacagaaaaguggagaaggcagauucuuacggcaguugauccaaggugcuc

SEQ ID NO: 2419 - RNA, 22 nt, Homo sapiens
aggcauaaugucaaaguaaaaa

SEQ ID NO: 2420 - RNA, 171 nt, Homo sapiens
uuuauaaugaacagaacaaaaacguuccaacacacauguucauuacuauuuucugaaggcauaaugucaaaguaaaaauuuuucuguuacacugaauuuuauuuuggcauuaugccaucaaaauauaauaaagaacauguguuggaaacuccuugcuuuacucauuauaaa

SEQ ID NO: 2421 - RNA, 22 nt, Homo sapiens
aggagaaaggaaggaacagggg

SEQ ID NO: 2422 - RNA, 137 nt, Homo sapiens
gguagaggagggcccagggagguugugaaaugaaggagaaaggaaggaacagggguccgggaagaguaacugucuuguucucaucuuucuucuuuuccuugcagcaaacaguuuguggauuugaccuucuucgugcc

SEQ ID NO: 2423 - RNA, 22 nt, Homo sapiens
uggcagugucuaggggucuggg

SEQ ID NO: 2424 - RNA, 78 nt, Homo sapiens
aucuuugugucucaggccucagccugccaggccugggcuuucugcuuggcagugucuaggggucuggggcaaaaagau

SEQ ID NO: 2425 - RNA, 22 nt, Homo sapiens
ccacaauacagugggaggcaca

SEQ ID NO: 2426 - RNA, 66 nt, Homo sapiens
ggaccacaauacagugggaggcacaggucugaaaggcucugcgccucccaucugaggugcggaucc

SEQ ID NO: 2427 - RNA, 22 nt, Homo sapiens
aggggaaauccauaagcuuugu

SEQ ID NO: 2428 - RNA, 80 nt, Homo sapiens
aggaggggaaggggaaauccauaagcuuugucugauuucuuauagaaaaaaguagauggauuuaguccagguccugucuu

SEQ ID NO: 2429 - RNA, 22 nt, Homo sapiens
agguggugacuguugugggcau

SEQ ID NO: 2430 - RNA, 77 nt, Homo sapiens
agaaggaagguggugacuguugugggcaugacagccuccccucuugcucagaaugguucacccauccugcucuuucu

SEQ ID NO: 2431 - RNA, 22 nt, Homo sapiens
aguacccugaaggaggggcagg

SEQ ID NO: 2432 - RNA, 107 nt, Homo sapiens
gcugugacccaugaggcuucucuucugccucugaccuggagggguucuggccacggaaguacccugaaggaggggcaggaggugagaagaugggaaaaaagaacagu

SEQ ID NO: 2433 - RNA, 22 nt, Homo sapiens
augggcugagagguggccggug

SEQ ID NO: 2434 - RNA, 106 nt, Homo sapiens
uccugcacagaguccuugaaaucuuggcuguccucugucccuucgagcacaugcugaaugggcugagagguggccggugugguguucugggauuagggaugcagga

SEQ ID NO: 2435 - RNA, 22 nt, Homo sapiens
auuaggcaagcuuuuccuggag

SEQ ID NO: 2436 - RNA, 55 nt, Homo sapiens
uuccagagaagagcucuguuuuucuaggugagaauuaggcaagcuuuuccuggag

SEQ ID NO: 2437 - RNA, 22 nt, Homo sapiens
caguauauggugguagaggcac

SEQ ID NO: 2438 - RNA, 67 nt, Homo sapiens
uucugucuucucuauuauaagcugggugucuaagagauagacaguauauggugguagaggcacagga

SEQ ID NO: 2439 - RNA, 22 nt, Homo sapiens
cacccacagggugaacaggaaa

SEQ ID NO: 2440 - RNA, 86 nt, Homo sapiens
uucuguuucgaugacacccacagggugaacaggaaagaaaauaauuuaucuuuccugcucacccuguggguaucaucggaacagaa

SEQ ID NO: 2441 - RNA, 22 nt, Homo sapiens
cagauaguugcucgggggucga

SEQ ID NO: 2442 - RNA, 107 nt, Homo sapiens
ugggggggugggugggagcgagggacagauaguugcucgggggucgaggcgggggacgccucgacuuuucgagauaacagguuuguccgauuccccccacgccccca

SEQ ID NO: 2443 - RNA, 22 nt, Homo sapiens
caggaacagcaggguugugagg

SEQ ID NO: 2444 - RNA, 82 nt, Homo sapiens
gagcuuguuguccucacaaccuugcuguuccugucaucuucucuccaggcgacaggaacagcaggguugugagggcuugcuu

SEQ ID NO: 2445 - RNA, 22 nt, Homo sapiens
caggcaggggauggggaggaga

SEQ ID NO: 2446 - RNA, 72 nt, Homo sapiens
agacaggcaggggauggggaggagaacaggacuaaaagcagucaccucuuccucucuucccccagccuaucu

SEQ ID NO: 2447 - RNA, 22 nt, Homo sapiens
cagggaaggccugagggcuggu

SEQ ID NO: 2448 - RNA, 104 nt, Homo sapiens
uguaaggucaaagcugcuuagagacagggaaggccugagggcuggugacgcucccauggccuuugggauccccagcucucuccucccucucacagccccuugca

SEQ ID NO: 2449 - RNA, 17 nt, Homo sapiens
cccaccgggggaugaau

SEQ ID NO: 2450 - RNA, 137 nt, Homo sapiens; identical to SEQ ID NO: 1082

SEQ ID NO: 2451 - RNA, 22 nt, Homo sapiens
cacugguugguaaauacuauga

SEQ ID NO: 2452 - RNA, 79 nt, Homo sapiens
auuuuucuucauagcauuugccaaccaguggcagcuuggcaaccugacccacugguugguaaauacuaugaagaaaaau

SEQ ID NO: 2453 - RNA, 21 nt, Homo sapiens
cuuuuacagcauugggagggu

SEQ ID NO: 2454 - RNA, 56 nt, Homo sapiens
accuuuucaagcuccaagaguuucacauuuggagacuuuuacagcauugggagggu

SEQ ID NO: 2455 - RNA, 20 nt, Homo sapiens
gacagaagcagcugggagga

SEQ ID NO: 2456 - RNA, 58 nt, Homo sapiens
ucugcucagcuguuuuguuuccaggagccugagagagagacagaagcagcugggagga

SEQ ID NO: 2457 - RNA, 22 nt, Homo sapiens
gaaagcuguguuggagaggcag

SEQ ID NO: 2458 - RNA, 123 nt, Homo sapiens
cuggcuacauuaaacaaguaaauuuguagcuuagcacgguuuacuuaacaagcccaguuaugacagagcuggagaggagagaaagcuguguuggagaggcaggaaggugugauguucagccag

SEQ ID NO: 2459 - RNA, 22 nt, Homo sapiens
gaagaaggagcggcccuuguga

SEQ ID NO: 2460 - RNA, 72 nt, Homo sapiens
cugagagaagaaggagcggcccuugugaccagugcccuuuugguucacaaggaacgucuccucuuguugaag

SEQ ID NO: 2461 - RNA, 22 nt, Homo sapiens
gaaguguagacaaggugggagu

SEQ ID NO: 2462 - RNA, 87 nt, Homo sapiens
ggaccccuguuuaucuucaccugcucuacccacuuccaucccacccuaugaaaggagaaguguagacaaggugggaguuaggguccc

SEQ ID NO: 2463 - RNA, 22 nt, Homo sapiens
gaccgcaugcuaaguugggccc

SEQ ID NO: 2464 - RNA, 108 nt, Homo sapiens
gucccagcagugucuaaugaccuggagagaccgcaugcuaaguugggcccccacuuuccagccuagggugugacauagcagagugguuuaagguuaugagcaugggau

SEQ ID NO: 2465 - RNA, 22 nt, Homo sapiens
gacugagggauggugggcuugu

SEQ ID NO: 2466 - RNA, 71 nt, Homo sapiens
gacggagacugagggauggugggcuugugcauagugguucuggcagcucaucugcaccuugguucucuguc

SEQ ID NO: 2467 - RNA, 22 nt, Homo sapiens
gacugggguggggagcgaggag

SEQ ID NO: 2468 - RNA, 72 nt, Homo sapiens
gagacugggguggggagcgaggagagcacugcuucacgcuaacagccacuuuuccuucacacuuccagucuu

SEQ ID NO: 2469 - RNA, 22 nt, Homo sapiens
ggguuggguggaggcucuccug

SEQ ID NO: 2470 - RNA, 80 nt, Homo sapiens
aggacccuuccagagggcccccccucaauccuguugugccuaauucagaggguuggguggaggcucuccugaagggcucu

SEQ ID NO: 2471 - RNA, 22 nt, Homo sapiens
gagagaugagggcagaggagga

SEQ ID NO: 2472 - RNA, 84 nt, Homo sapiens
guguuuguucgaucuuuccaucuccucauuguuucucucuaaauagagagagagagaugagggcagaggaggaauugcaaucac

SEQ ID NO: 2473 - RNA, 22 nt, Homo sapiens
cagacuccaguuugagccuuua

SEQ ID NO: 2474 - RNA, 81 nt, Homo sapiens
cagguuucacccagacuccaguuugagccuuuaaaacuguagaacagggaugguucaugcagaggucugggauggagucug

SEQ ID NO: 2475 - RNA, 22 nt, Homo sapiens
gaggacagggggcuuuuuaauu

SEQ ID NO: 2476 - RNA, 69 nt, Homo sapiens; identical to SEQ ID NO: 1332

SEQ ID NO: 2477 - RNA, 22 nt, Homo sapiens
gaggagaagggggaggugauau

SEQ ID NO: 2478 - RNA, 65 nt, Homo sapiens
agagaggagaagggggaggugauauugcagaaaacaugguaaacucuccucucuuucugcuuucu

SEQ ID NO: 2479 - RNA, 22 nt, Homo sapiens
gaggcaguggaagggaaaguau

SEQ ID NO: 2480 - RNA, 102 nt, Homo sapiens
cucugggggaauguggucccccuuuuacugccuuuuucagcccacuccccccaguugaauuuuucugagaggcaguggaagggaaaguauauacccccauag

SEQ ID NO: 2481 - RNA, 22 nt, Homo sapiens
gagggaaggaauggggagagag

SEQ ID NO: 2482 - RNA, 85 nt, Homo sapiens
agcuccagagagggaaggaauggggagagagcuggcccagugggcagcuguuuucugccuguccucccuccuguauucuggggcu

SEQ ID NO: 2483 - RNA, 22 nt, Homo sapiens
gaggcggagacuugggcaauug

SEQ ID NO: 2484 - RNA, 84 nt, Homo sapiens
ggccaguguugagaggcggagacuugggcaauugcuggacgcugcccugggcauugcacuugucucggucugacagugccggcc

SEQ ID NO: 2485 - RNA, 22 nt, Homo sapiens
gcaagagcaggagcaggagucc

SEQ ID NO: 2486 - RNA, 138 nt, Homo sapiens
cauucaaaguguccuuucagcuugcucugcuggagcaagagcaggagcaggaguccucauggaggcaaacaguggggcucacugguuuucucuuauuuagcagaagcacuuggagcuucugaaggacuacugggaaug

SEQ ID NO: 2487 - RNA, 22 nt, Homo sapiens
gcaagggaugggcgggcugcuu

SEQ ID NO: 2488 - RNA, 73 nt, Homo sapiens
ugagcagcauggccauccugggcuucccuuaacacgagggcugggauugagcaagggaugggcgggcugcuua

SEQ ID NO: 2489 - RNA, 22 nt, Homo sapiens
gcaauggcgagggaggggagag

SEQ ID NO: 2490 - RNA, 68 nt, Homo sapiens
gggucccccauccucgaccaucuuuguuugcccuauuagggggagcaauggcgagggaggggagagcu

SEQ ID NO: 2491 - RNA, 22 nt, Homo sapiens
gcaauuuaaaauuacuggagug

SEQ ID NO: 2492 - RNA, 149 nt, Homo sapiens
gucugacucacuucuaaauugaagugcauauauaaaaaaaauugaaucacuccaaugauuuuaaaucacucuucaaugugcagagcaauuuaaaauuacuggagugcuuccaauuuuuauuaguccuugaauuuggaagugaucuaggc

SEQ ID NO: 2493 - RNA, 22 nt, Homo sapiens
gcagauggacuguugagaguca

SEQ ID NO: 2494 - RNA, 94 nt, Homo sapiens
augcuuauugaccuuaauaaucugcuccacugaggacccacaaggaagugaggagcguauuugagcagauggacuguugagagucaauuugcau

SEQ ID NO: 2495 - RNA, 22 nt, Homo sapiens
gccgggaguugagaugugagca

SEQ ID NO: 2496 - RNA, 106 nt, Homo sapiens
gcagugaguggauaaaugagccgggaguugagaugugagcacccuccuauggagaguuaucucagauuacucuuggcuuccagaaguaacauuuagccaucaaggc

SEQ ID NO: 2497 - RNA, 22 nt, Homo sapiens
ggagccaagguggcagaguggu

SEQ ID NO: 2498 - RNA, 68 nt, Homo sapiens
cgcaccacccucccacugugguuucuuuguguccguuauaggaggagccaagguggcagaguggugug

SEQ ID NO: 2499 - RNA, 22 nt, Homo sapiens
ggaggagggcgcaaaguccuuu

SEQ ID NO: 2500 - RNA, 60 nt, Homo sapiens
ggaggagggcgcaaaguccuuuuguacgcagaaauaaggagcgacauuguguuuucuucc

SEQ ID NO: 2501 - RNA, 22 nt, Homo sapiens
ggagguaggaaggagcccugca

SEQ ID NO: 2502 - RNA, 58 nt, Homo sapiens
ggagguaggaaggagcccugcacaggaggcuugacacaugggcccuauuccugccucc

SEQ ID NO: 2503 - RNA, 22 nt, Homo sapiens
ggagguggcagggaacauaauu

SEQ ID NO: 2504 - RNA, 57 nt, Homo sapiens
ggagguggcagggaacauaauuucuguuugaaaguucuuuuguuuucugcuaccuuu

SEQ ID NO: 2505 - RNA, 22 nt, Homo sapiens
gcuguaaguacuuaggagggag

SEQ ID NO: 2506 - RNA, 68 nt, Homo sapiens
auggagcuguaaguacuuaggagggagacuuuuccagcagucucucucuuggguaucugagugucuau

SEQ ID NO: 2507 - RNA, 16 nt, Homo sapiens
gcuuaugaacaccccc

SEQ ID NO: 2508 - RNA, 59 nt, Homo sapiens; identical to SEQ ID NO: 2002

SEQ ID NO: 2509 - RNA, 22 nt, Homo sapiens
gcuuuuuguggcaggaaggucu

SEQ ID NO: 2510 - RNA, 69 nt, Homo sapiens
cugcuucccucucuccacugaacacucauuuucugcacugugagcuuuuuguggcaggaaggucuguag

SEQ ID NO: 2511 - RNA, 22 nt, Homo sapiens
ggaagggaguggggcugugcag

SEQ ID NO: 2512 - RNA, 86 nt, Homo sapiens
uccaggaccaaggcacagcugccauccccugccucucacuaugcugguauaggaggaagggaguggggcugugcagagucucuggg

SEQ ID NO: 2513 - RNA, 22 nt, Homo sapiens
ggaaugaagaagugaaggggug

SEQ ID NO: 2514 - RNA, 107 nt, Homo sapiens
cuuuucuuuucuuucccugucccuuuucucuuacauuuuuugccacuugagacuuagugaaaggaggaaugaagaagugaagggguggugagagagaagaguaaaag

SEQ ID NO: 2515 - RNA, 22 nt, Homo sapiens
ggagacggacagcggagaagug

SEQ ID NO: 2516 - RNA, 89 nt, Homo sapiens
uccacccaggccacacuucuucuucccugucucuucccuuagacaaauggaggagacggacagcggagaaguggagggagcugggggga

SEQ ID NO: 2517 - RNA, 21 nt, Homo sapiens
ggagaggaggagcugagucac

SEQ ID NO: 2518 - RNA, 62 nt, Homo sapiens
gugcucucagcaucccccauccccccuuaauugcagccagaggagaggaggagcugagucac

SEQ ID NO: 2519 - RNA, 22 nt, Homo sapiens
ggagaaaggggcgggcaucugg

SEQ ID NO: 2520 - RNA, 97 nt, Homo sapiens
gggggagguuggcuggaggaggagaaaggggcgggcaucugggagggucucagccacucucagaggcuuauucaucucauccuccuuucccuccccc

SEQ ID NO: 2521 - RNA, 22 nt, Homo sapiens
ggaggaggagcugaagcuuggu

SEQ ID NO: 2522 - RNA, 140 nt, Homo sapiens
gggccugggugccgaggccuggggaggaggaggagcugaagcuuggucacuuccgacuguuucugaaggaaagaggcccugggcccacggcuucagcccugcucagaccaacacaaacaagccucacgcaccucaggccc

SEQ ID NO: 2523 - RNA, 22 nt, Homo sapiens
ggcaggagugcauaaacagcua

SEQ ID NO: 2524 - RNA, 99 nt, Homo sapiens
gcuugcugaaguaauguugcuuaugcacuucuccucaggccccaguuaaaaggaauucagaggcaggagugcauaaacagcuacauuacuuuggggagc

SEQ ID NO: 2525 - RNA, 22 nt, Homo sapiens
gggacugggggauggugggaag

SEQ ID NO: 2526 - RNA, 73 nt, Homo sapiens
gggacugggggauggugggaaggcaaucuggccaggagaagcugcgggggagacucccgccauccccaguccc

SEQ ID NO: 2527 - RNA, 22 nt, Homo sapiens
gggagucccagaggggugacag

SEQ ID NO: 2528 - RNA, 95 nt, Homo sapiens
aagaaggcagagcucaaggagggagucccagaggggugacaguccuuugcucaugcuguggcucacuccuggguucccuucccucucuccuuuuu

SEQ ID NO: 2529 - RNA, 20 nt, Homo sapiens
gggcaugauugcaauuaaaa

SEQ ID NO: 2530 - RNA, 59 nt, Homo sapiens
uuuuaauugcaauuauggucccuuaugaguccccugggagggcaugauugcaauuaaaa

SEQ ID NO: 2531 - RNA, 20 nt, Homo sapiens
ggggacugaauggggugguc

SEQ ID NO: 2532 - RNA, 75 nt, Homo sapiens
gaccacucuaugccucaguuuccucauuuguaaaauggguagacaaggauguggaggggacugaauggggugguc

SEQ ID NO: 2533 - RNA, 22 nt, Homo sapiens
ggggccaaagagggaggagauc

SEQ ID NO: 2534 - RNA, 67 nt, Homo sapiens
gggaggggccaaagagggaggagaucuacugcguucuguggcccucuccucccuuccuguccuuccc

SEQ ID NO: 2535 - RNA, 22 nt, Homo sapiens
ggggcuugugaggguuuggagu

SEQ ID NO: 2536 - RNA, 68 nt, Homo sapiens
aggcuacccccaaaccuucagcugcucagaguccugcuggaggggcuugugaggguuuggagugggcu

SEQ ID NO: 2537 - RNA, 22 nt, Homo sapiens
gggguggggaaggaggucacag

SEQ ID NO: 2538 - RNA, 55 nt, Homo sapiens
gggguggggaaggaggucacagccaagaaaacugcccugugacgacuucccuccu

SEQ ID NO: 2539 - RNA, 22 nt, Homo sapiens
ggggcacuaugggcucucugga

SEQ ID NO: 2540 - RNA, 135 nt, Homo sapiens
ggggggggcuggcguaguuugccugugugggccaguucagugagccaucugugcucaguccagagaccauugggagaggggcacuaugggcucucuggacauugcaucugggaagcuuagaaccagccccauccc

SEQ ID NO: 2541 - RNA, 22 nt, Homo sapiens
gggggagcuaaugggcauugcu

SEQ ID NO: 2542 - RNA, 90 nt, Homo sapiens; identical to SEQ ID NO: 772

SEQ ID NO: 2543 - RNA, 22 nt, Homo sapiens
gggggugcagaaguuuggagca

SEQ ID NO: 2544 - RNA, 105 nt, Homo sapiens
ugagagguggcuuuuuccuguggugccaggcuuuuguaaucuuugcucuugaccuucgccgggagggggugcagaaguuuggagcaccauggauguaaccuuuca

SEQ ID NO: 2545 - RNA, 22 nt, Homo sapiens
gguagcuguggcuggcuggguu

SEQ ID NO: 2546 - RNA, 82 nt, Homo sapiens
gaguuaugagguagcuguggcuggcuggguuuugaugaaguacccauaauuucauaucagcugccacaggacuuucugacuu

SEQ ID NO: 2547 - RNA, 22 nt, Homo sapiens
gguggucuuggcuacggggucu

SEQ ID NO: 2548 - RNA, 114 nt, Homo sapiens
agggccgggcaguggcgcagugagguggucuuggcuacggggucucccucaggcagggagccuccaccagacccugaggcccaaccagcagcaaugcacccacucacccucccu

SEQ ID NO: 2549 - RNA, 22 nt, Homo sapiens
gguuauuuaggguuaccaccug

SEQ ID NO: 2550 - RNA, 66 nt, Homo sapiens
ugagguuauuuaggguuaccaccuggcuacuagauuugccagauggcaagccugaguaacugcuca

SEQ ID NO: 2551 - RNA, 20 nt, Homo sapiens
gucagggaggccauuuagga

SEQ ID NO: 2552 - RNA, 78 nt, Homo sapiens
uuuuaaauggccacucuggcuucagucugggaauggauuugaaagggacagaaguagagucagggaggccauuuagga

SEQ ID NO: 2553 - RNA, 21 nt, Homo sapiens
gugcaggcugggauguggcac

SEQ ID NO: 2554 - RNA, 65 nt, Homo sapiens
gugacccacaucgccugccugacacacuccagacacugcagggagugcaggcugggauguggcac

SEQ ID NO: 2555 - RNA, 22 nt, Homo sapiens
guggggaugaggccuggggguu

SEQ ID NO: 2556 - RNA, 75 nt, Homo sapiens
agaacgcagauugccaggcccacccucuuagguguaaugauugaguggggaugaggccuggggguuugcauuucu

SEQ ID NO: 2557 - RNA, 17 nt, Homo sapiens
guggggcagcaaaagca

SEQ ID NO: 2558 - RNA, 69 nt, Homo sapiens
uguuuuagcuggcccauuuugaaaauugaggucauggaugauggcuuccugaguggggcagcaaaagca

SEQ ID NO: 2559 - RNA, 22 nt, Homo sapiens
guggguacaguggggagugacc

SEQ ID NO: 2560 - RNA, 91 nt, Homo sapiens
uucuccuccugcugucauuucucauuacugcccuugacuucuuucuagaagaguggguacaguggggagugaccagcccccaggaagagga

SEQ ID NO: 2561 - RNA, 22 nt, Homo sapiens
gugguuaucccugcuguguucg

SEQ ID NO: 2562 - RNA, 80 nt, Homo sapiens
gguacuugaagagugguuaucccugcuguguucgcuuaauuuaugacgaaucauacagggacauccaguuuuucaguauc

SEQ ID NO: 2563 - RNA, 22 nt, Homo sapiens
ucaacacuuuaaaaaucuuucu

SEQ ID NO: 2564 - RNA, 81 nt, Homo sapiens
guuuuccaucaugaggccauuugaagugugagauuguuuuucugaaagaucaacacuuuaaaaaucuuucugaugacaaac

SEQ ID NO: 2565 - RNA, 22 nt, Homo sapiens
ucauggccaggaucuaggguuu

SEQ ID NO: 2566 - RNA, 72 nt, Homo sapiens
uugagaggcccauuggauccuggccauggguacagauguaugaucauggccaggaucuaggguuuugcucaa

SEQ ID NO: 2567 - RNA, 22 nt, Homo sapiens
uccaccucaauuuauuccuaau

SEQ ID NO: 2568 - RNA, 109 nt, Homo sapiens
uaaauucuaauuggaacaggauccaccucaauuuauuccuaaugccucagaaaagcagaacuguuucuaggaauaaauugagauggauucuauuccaauuaacaguuug

SEQ ID NO: 2569 - RNA, 22 nt, Homo sapiens
uccacgcuuagguggagcgagg

SEQ ID NO: 2570 - RNA, 56 nt, Homo sapiens
auccacgcuuagguggagcgagggggcguuccuuggcuuucuaggcuggacuuucu

SEQ ID NO: 2571 - RNA, 22 nt, Homo sapiens
ucccaggagacaggcauaggac

SEQ ID NO: 2572 - RNA, 107 nt, Homo sapiens
cgcccccagggguuagagaucccaggagacaggcauaggacaauaauagcaaacgccuuuccuaggccuuucuucuguggaucugugugcacccagaaccaggggug

SEQ ID NO: 2573 - RNA, 22 nt, Homo sapiens
ucgggaaagcugcccgaaugag

SEQ ID NO: 2574 - RNA, 79 nt, Homo sapiens
ggguggugaucgggaaagcugcccgaaugaguaagauucugacgcuuguuuggaguaguuuauccucugucuaccaccu

SEQ ID NO: 2575 - RNA, 22 nt, Homo sapiens
ucucaagggagggugcaggccu

SEQ ID NO: 2576 - RNA, 109 nt, Homo sapiens
agcccucaaaccugcugggugugaucucaagggagggugcaggccucccccuccucucaccuugcuugcuucccuccugugagaucugcagcucccacccaggagggcu

SEQ ID NO: 2577 - RNA, 22 nt, Homo sapiens
ugcagguggcuaauuguccaug

SEQ ID NO: 2578 - RNA, 90 nt, Homo sapiens
cccauggggucuggcagaugcaauuagccucugggucccucagaauuagaugcagguggcuaauuguccaugccaggaggcaacuguggg

SEQ ID NO: 2579 - RNA, 22 nt, Homo sapiens
uggcagcaggagaaggugcccu

SEQ ID NO: 2580 - RNA, 84 nt, Homo sapiens
cccagugcagggauggcagcaggagaaggugcccucaugcaggagcugugggcagcuccuccugucaucugucuuugcccaggg

SEQ ID NO: 2581 - RNA, 22 nt, Homo sapiens
ugaggguaggugggguggcugc

SEQ ID NO: 2582 - RNA, 74 nt, Homo sapiens
ggcugaaggaugaggguaggugggguggcugcucaggaggacuguggaggccacaucgccuaaccuucgaggcc

SEQ ID NO: 2583 - RNA, 22 nt, Homo sapiens
aggagaggggauuuuguuaccu

SEQ ID NO: 2584 - RNA, 89 nt, Homo sapiens
cucccugaaaugaaaggagaggggauuuuguuaccuagagggcuugacugcaauuagguaauauauuuccuccucuucauuucugggag

SEQ ID NO: 2585 - RNA, 22 nt, Homo sapiens
ugcagggauggaggggaugggg

SEQ ID NO: 2586 - RNA, 63 nt, Homo sapiens
ugcagggauggaggggauggggccuggaccacuaguuagagccaucccguccgccccuuucag

SEQ ID NO: 2587 - RNA, 22 nt, Homo sapiens
ugcuggcugagggacacaggcu

SEQ ID NO: 2588 - RNA, 129 nt, Homo sapiens
agugcugccgggagacaggguggcugggcucugggaugcuggcugagggacacaggcucccuccuguccuccggggccaguggacccuggggcagcccccaugccugcuguccuguccccacacagccu

SEQ ID NO: 2589 - RNA, 22 nt, Homo sapiens
ugucccggcucuauccccagcu

SEQ ID NO: 2590 - RNA, 67 nt, Homo sapiens
gggggcggggaggaugaggggcacuggucggguguucucugaugucccggcucuauccccagcuccc

SEQ ID NO: 2591 - RNA, 22 nt, Homo sapiens
uggagggggaggggaaagauga

SEQ ID NO: 2592 - RNA, 85 nt, Homo sapiens
gggguggauggagggggaggggaaagaugagggaaggcaaaggacuaugugggucuuuccccuccuccauuuccugcucugcccc

SEQ ID NO: 2593 - RNA, 22 nt, Homo sapiens
uggaguugggggaacauugugu

SEQ ID NO: 2594 - RNA, 98 nt, Homo sapiens
gugcuucuagauggaguugggggaacauugugugcugaaucccuuucugaggacuugguguucacuuuucauacaugugccuuaacuucauuuuucac

SEQ ID NO: 2595 - RNA, 22 nt, Homo sapiens
ugggagaauuugaaguuaaaau

SEQ ID NO: 2596 - RNA, 111 nt, Homo sapiens; identical to SEQ ID NO: 786

SEQ ID NO: 2597 - RNA, 22 nt, Homo sapiens
ugggagagagaaaaugugugug

SEQ ID NO: 2598 - RNA, 127 nt, Homo sapiens
gcagguuuuauuuccguagccucacagccuugaugggagagagaaaauguguguguguuuuccaucccugaauauacacauuuuaucucuccucuugaggcugugaggcuagggaaauaaaaccugc

SEQ ID NO: 2599 - RNA, 22 nt, Homo sapiens
ugggagaugggcagauaaucuu

SEQ ID NO: 2600 - RNA, 72 nt, Homo sapiens
gguggaugggagaugggcagauaaucuucacucagaucuaaacauggauuauuugugcauaucccauccacc

SEQ ID NO: 2601 - RNA, 22 nt, Homo sapiens
uggggggcagaagccuaaggcu

SEQ ID NO: 2602 - RNA, 69 nt, Homo sapiens
ggggauggggggcagaagccuaaggcuaccaccccuuuauuugccuucaugcugcugucccuuuucccc

SEQ ID NO: 2603 - RNA, 22 nt, Homo sapiens
uggggugcggcucugagggggu

SEQ ID NO: 2604 - RNA, 71 nt, Homo sapiens
gagauggggugcggcucugaggggguagcacugaucagccacaugcccuucagcaagucgcauccccucuc

SEQ ID NO: 2605 - RNA, 22 nt, Homo sapiens
ugggugggagagcuuuccugga

SEQ ID NO: 2606 - RNA, 90 nt, Homo sapiens
ggagaugggcagggaugggugggagagcuuuccuggaaaaaucuucucucacccucuucaggagccuuuuuccacccauccuccuccucc

SEQ ID NO: 2607 - RNA, 22 nt, Homo sapiens
aggggagggggucuuuggggag

SEQ ID NO: 2608 - RNA, 56 nt, Homo sapiens
aggggagggggucuuuggggagcugguuaaagauccagaaucggccccucgccccu

SEQ ID NO: 2609 - RNA, 19 nt, Homo sapiens
uggguugggugaggaucuc

SEQ ID NO: 2610 - RNA, 73 nt, Homo sapiens
gggguccucaguuuccccauccccagugcccccaugggcaaaacauucuacagauggguugggugaggaucuc

SEQ ID NO: 2611 - RNA, 22 nt, Homo sapiens
uggugaagaggggaaagaagaa

SEQ ID NO: 2612 - RNA, 72 nt, Homo sapiens
uggauggugaagaggggaaagaagaaggaauaauuugugucuaaaaucuccuuucuccucugaaccacucua

SEQ ID NO: 2613 - RNA, 22 nt, Homo sapiens
uucggggccguagcacugucug

SEQ ID NO: 2614 - RNA, 82 nt, Homo sapiens
ugagcuguuggauucggggccguagcacugucugagagguuuacauuucucacagugaaccggucucuuuuucagcugcuuc

SEQ ID NO: 2615 - RNA, 22 nt, Homo sapiens
aaaguucugagacacuccgacu

SEQ ID NO: 2616 - RNA, 68 nt, Homo sapiens
gaggcaaaguucugagacacuccgacucugaguaugauagaagucagugcacuacagaacuuugucuc

SEQ ID NO: 2617 - RNA, 22 nt, Homo sapiens
aaccguggcuuucgauuguuac

SEQ ID NO: 2618 - RNA, 101 nt, Homo sapiens
ccgcccccgcgucuccagggcaaccguggcuuucgauuguuacugugggaacuggagguaacagucuacagccauggucgccccgcagcacgcccacgcgc

SEQ ID NO: 2619 - RNA, 22 nt, Homo sapiens
acacaagcucgugucugugggu

SEQ ID NO: 2620 - RNA, 70 nt, Homo sapiens; identical to SEQ ID NO: 1032

SEQ ID NO: 2621 - RNA, 22 nt, Homo sapiens
agggggagggugaagagauggg

SEQ ID NO: 2622 - RNA, 92 nt, Homo sapiens
gcuagaagaguacagaaagggggagggugaagagaugggauuacuacaggugaucuuuacauuauuuuucaugcuuuucuaaacuuuucugc

SEQ ID NO: 2623 - RNA, 22 nt, Homo sapiens
agagcuuagcugauuggugaac

SEQ ID NO: 2624 - RNA, 97 nt, Homo sapiens
accucucuaacaaggugcagagcuuagcugauuggugaacagugauugguuuccgcuuuguucacaguggcuaaguucugcaccugaagagaaggug

SEQ ID NO: 2625 - RNA, 22 nt, Homo sapiens
agagguugcccuuggugaauuc

SEQ ID NO: 2626 - RNA, 69 nt, Homo sapiens
uugagcagagguugcccuuggugaauucgcuuuauuuauguugaaucacacaaaggcaacuuuuguuug

SEQ ID NO: 2627 - RNA, 22 nt, Homo sapiens
uggugggaaacugacagaauga

SEQ ID NO: 2628 - RNA, 75 nt, Homo sapiens
cucuucuuugucaguuuacgccauuccuuggugcgaaagugacaaguagugauggugggaaacugacagaaugag

SEQ ID NO: 2629 - RNA, 22 nt, Homo sapiens
aggggugggaucugaaugugug

SEQ ID NO: 2630 - RNA, 86 nt, Homo sapiens
gggggaaaggggugggaucugaauguguggaggucaagguccugacaaugugauaaugauauaagcagagcucuccccuuucucuc

SEQ ID NO: 2631 - RNA, 22 nt, Homo sapiens
uagagguacaguaggcaugacu

SEQ ID NO: 2632 - RNA, 79 nt, Homo sapiens
guuuauuuugagaguguuugcuguauaauuggacuuaauaaaauguuuagagguacaguaggcaugacuuuggguagau

SEQ ID NO: 2633 - RNA, 22 nt, Homo sapiens
uuaaugaccagcugggaggaac

SEQ ID NO: 2634 - RNA, 171 nt, Homo sapiens
uuucuauaauggugcuuuagcaauaaugauggaggugcaggcauuuccugaggauuaaugaccagcugggaggaaccaguggcccuuggcucugccucccagccagccauuaauucuaaggaaaugucuuuugcugaggucguuacugcuauuauaagcuuaaaauggaaa

SEQ ID NO: 2635 - RNA, 22 nt, Homo sapiens
uuccuucuaaaaguugaagggu

SEQ ID NO: 2636 - RNA, 126 nt, Homo sapiens
acauguuucaacaacaaaaaauuaacugauuccuucuaaaaguugaagggucaauauccacugccaaggagccuucagcuuuuagaaggaaucgguuaauucccauuuuuguuguuguugacgugu

SEQ ID NO: 2637 - RNA, 22 nt, Homo sapiens
uuuccacaggaugguggguggg

SEQ ID NO: 2638 - RNA, 67 nt, Homo sapiens
cuucccauccuccaugcaugggaaucuaugaccaaacauagauuuccacaggauggugggugggugg

SEQ ID NO: 2639 - RNA, 22 nt, Homo sapiens
uuuguuuugcucugggcuggga

SEQ ID NO: 2640 - RNA, 72 nt, Homo sapiens
ggguaauuccaguuuggugcaauaaauuauaugguucugcuugauuuguuuugcucugggcugggagaacuc

SEQ ID NO: 2641 - RNA, 20 nt, Homo sapiens
aaaaggcacuggggugggcu

SEQ ID NO: 2642 - RNA, 75 nt, Homo sapiens
agcucccccagugccuucugcuccuggauccuacccuuuuauccaacaucccugcaaaaggcacuggggugggcu

SEQ ID NO: 2643 - RNA, 22 nt, Homo sapiens
aagccaggguggaaugcguggu

SEQ ID NO: 2644 - RNA, 77 nt, Homo sapiens
ugccuggccacggauccuucacccuggcuugacagcugguuuaaucugcaagccaggguggaaugcguggucuugca

SEQ ID NO: 2645 - RNA, 22 nt, Homo sapiens
aaggacugggcuggguuauuau

SEQ ID NO: 2646 - RNA, 80 nt, Homo sapiens
acacggggccugguccagcccaacccuugucucagccuggcccaaaagcaaggacugggcuggguuauuauuccuugugu

SEQ ID NO: 2647 - RNA, 22 nt, Homo sapiens
aagugagcggcaaggccguggu

SEQ ID NO: 2648 - RNA, 105 nt, Homo sapiens
gagaagcagccaccgagaaggggcaagugagcggcaaggccgugguuccacauucccaaaccacgcuuuguccuuccugggguccccguagguggggcucuucuc

SEQ ID NO: 2649 - RNA, 22 nt, Homo sapiens
aagugaugggggcugauagaca

SEQ ID NO: 2650 - RNA, 117 nt, Homo sapiens
ucuccuacuccccuuggccaauccucacuugucuaucggcccccaucacuuguaagguaaacaaacagcaagugaugggggcugauagacaggugaggauugaagcggacugggaga

SEQ ID NO: 2651 - RNA, 22 nt, Homo sapiens
ugguggggucacgguccuucag

SEQ ID NO: 2652 - RNA, 131 nt, Homo sapiens
gggauccugcccugcgauaguccagugacugaguccgcaguaaggcagugguccuccaaugcuggaguucacggcgugguggggucacgguccuucagugucuuaguccauggguaccagggcgggggucc

SEQ ID NO: 2653 - RNA, 22 nt, Homo sapiens
agacuggaaaaucucugcaggc

SEQ ID NO: 2654 - RNA, 78 nt, Homo sapiens
cagacuggaaaaucucugcaggcaaaugugaugucacugaggaaaucacacacuuacccguagagauucuacagucug

SEQ ID NO: 2655 - RNA, 22 nt, Homo sapiens
agcgggcaucauggggacagca

SEQ ID NO: 2656 - RNA, 73 nt, Homo sapiens
ccccaggcagcgggcaucauggggacagcaauggcuucuucuuugcugcacccaaggaguuggugacuugggg

SEQ ID NO: 2657 - RNA, 22 nt, Homo sapiens
caggagcugcuaagugcuccuc

SEQ ID NO: 2658 - RNA, 70 nt, Homo sapiens
caggccaggagcugcuaagugcuccucaagucaucauggccaguggguagcauggagagcuccuggcgug

SEQ ID NO: 2659 - RNA, 22 nt, Homo sapiens
caucuuacugggcagcauugga

SEQ ID NO: 2660 - RNA, 95 nt, Homo sapiens; identical to SEQ ID NO: 1042

SEQ ID NO: 2661 - RNA, 22 nt, Homo sapiens
uaccgcacuguggguacuugcu

SEQ ID NO: 2662 - RNA, 82 nt, Homo sapiens
ccugccggggcuaaagugcugacagugcagauagugguccucuccgugcuaccgcacuguggguacuugcugcuccagcagg

SEQ ID NO: 2663 - RNA, 22 nt, Homo sapiens
agggagggcagguaggggaaaa

SEQ ID NO: 2664 - RNA, 81 nt, Homo sapiens
uuuuuauuuuccucuuucucugcucuuaacccucagucacagaaucauguugcagggagggcagguaggggaaaaagaaaa

SEQ ID NO: 2665 - RNA, 17 nt, Homo sapiens
agggagguagaguagga

SEQ ID NO: 2666 - RNA, 79 nt, Homo sapiens
ucuuucucuccucccugccauccuccccucuuucugagccaagcugcaucaucacggggugcagggagguagaguagga

SEQ ID NO: 2667 - RNA, 19 nt, Homo sapiens
agggguggggagggugagg

SEQ ID NO: 2668 - RNA, 70 nt, Homo sapiens
cuucaaccccauccuccaccccugcccccgccacggccaagccagauuugcagggguggggagggugagg

SEQ ID NO: 2669 - RNA, 22 nt, Homo sapiens
aggugggugggacauuccaggc

SEQ ID NO: 2670 - RNA, 93 nt, Homo sapiens
cccucuccugcccuguucauaccugccuagcuacccacugcaacaaaaugagaaaugggccaugcaggugggugggacauuccaggcagaggg

SEQ ID NO: 2671 - RNA, 21 nt, Homo sapiens
aguuaauuggagggagggaga

SEQ ID NO: 2672 - RNA, 65 nt, Homo sapiens
uuuccuucuguucuaguuagcuguaggcuuggguagaauucagcaguuaauuggagggagggaga

SEQ ID NO: 2673 - RNA, 22 nt, Homo sapiens
aguuuuguuuuucaaaauaaua

SEQ ID NO: 2674 - RNA, 87 nt, Homo sapiens
uggcuucuauaaugcaguuuuguuuuucaaaauaauaaauuagcauuaauuuaggguugugacaagcuuaaucugcugcaaaagcca

SEQ ID NO: 2675 - RNA, 17 nt, Homo sapiens
auguacuuggguauaua

SEQ ID NO: 2676 - RNA, 75 nt, Homo sapiens
uaugugcccacuuauaugcugcauauaauucugcuuaccuggaaccauuuaaguaugcauguacuuggguauaua

SEQ ID NO: 2677 - RNA, 22 nt, Homo sapiens
auagugaccguuagagacuuau

SEQ ID NO: 2678 - RNA, 64 nt, Homo sapiens
uagggauaagguucugaugugcuuggcaucugccugcauagugaccguuagagacuuauucuua

SEQ ID NO: 2679 - RNA, 22 nt, Homo sapiens
augagauuggggugagggguaa

SEQ ID NO: 2680 - RNA, 116 nt, Homo sapiens
ggaagcaggggaggugggcaugagauuggggugagggguaauguugagaauccgcauguggaacgagcaagucuauucuuuacuauguuucaaagcuaaaauagucuccugcuuuu

SEQ ID NO: 2681 - RNA, 22 nt, Homo sapiens
auuacaccagcagcgagaggag

SEQ ID NO: 2682 - RNA, 76 nt, Homo sapiens
gccugccucuucuguguucugcguuuaaugcauauuaacuguaucugcauuacaccagcagcgagaggagacaggc

SEQ ID NO: 2683 - RNA, 22 nt, Homo sapiens
caccggaggagagaaauccugu

SEQ ID NO: 2684 - RNA, 91 nt, Homo sapiens
ccauugggcuguggccaccggaggagagaaauccuguggccauguguggucauuucaguuucuuuguuuccagcuuggccacacccaaugg

SEQ ID NO: 2685 - RNA, 22 nt, Homo sapiens
uggagggagcccacauugggag

SEQ ID NO: 2686 - RNA, 89 nt, Homo sapiens
agggcaugagcuuggagggagcccacauugggaggcccagcuggcaaucccaauggucucccaaugaggccccgaagcucucagguccu

SEQ ID NO: 2687 - RNA, 22 nt, Homo sapiens
caggcaucccaauuaggauuau

SEQ ID NO: 2688 - RNA, 92 nt, Homo sapiens
ucuaacccaaccaaucagccaggcaucccaauuaggauuauaagauuuucugauaauucuaauugggaugccuagcugauugguugggcuga

SEQ ID NO: 2689 - RNA, 22 nt, Homo sapiens
cagguggugguguucccauuuu

SEQ ID NO: 2690 - RNA, 86 nt, Homo sapiens
cuccacaccugaacaaugagaacagcaccgcuuggcucggaccccacugagccagguggugguguucccauuuuccagguauggag

SEQ ID NO: 2691 - RNA, 22 nt, Homo sapiens
caguaggagcagggcugggcag

SEQ ID NO: 2692 - RNA, 111 nt, Homo sapiens
ggggugguagugguggccaguaggagcagggcugggcagccucccuaacccacguucaugagacuugaagcuggcugguuuccuguccccuggccucccuugcccauuccc

SEQ ID NO: 2693 - RNA, 22 nt, Homo sapiens
cagugaccugaagaagauggga

SEQ ID NO: 2694 - RNA, 65 nt, Homo sapiens
uuucuuccuuuuucuuuuuggcucuuuauuuuauuugccagugaccugaagaagaugggaagaga

SEQ ID NO: 2695 - RNA, 22 nt, Homo sapiens
cauggcagggugggagaggcgg

SEQ ID NO: 2696 - RNA, 71 nt, Homo sapiens
aagggccauggcagggugggagaggcggugugagaagguccugucuucccacuaucugcucaucagcccuu

SEQ ID NO: 2697 - RNA, 22 nt, Homo sapiens
uggcuggggcagagauggggga

SEQ ID NO: 2698 - RNA, 64 nt, Homo sapiens
uuggcuggggcagagaugggggagucuugggggaacccaccagggccucuguggccccagcuga

SEQ ID NO: 2699 - RNA, 22 nt, Homo sapiens
ccaagauguuggcaggcuggga

SEQ ID NO: 2700 - RNA, 66 nt, Homo sapiens
gcccaagauguuggcaggcugggagcagcccuuccugggacugugcucucagcugcuggcacgggc

SEQ ID NO: 2701 - RNA, 22 nt, Homo sapiens
ccccugagggaaggaauagaau

SEQ ID NO: 2702 - RNA, 80 nt, Homo sapiens; identical to SEQ ID NO: 652

SEQ ID NO: 2703 - RNA, 22 nt, Homo sapiens
ccggcuauuuggcgggagcaga

SEQ ID NO: 2704 - RNA, 70 nt, Homo sapiens
gcccggcuauuuggcgggagcagaaauugccuguccgguuuuaugaucugcucagccugagcagccgggu

SEQ ID NO: 2705 - RNA, 22 nt, Homo sapiens
ccuuucuguguggaggccacgu

SEQ ID NO: 2706 - RNA, 58 nt, Homo sapiens
cccuuucuguguggaggccacguggcaaacuccaggugcaucugucauacagaaauug

SEQ ID NO: 2707 - RNA, 22 nt, Homo sapiens
cgggaagggggaggguuggagc

SEQ ID NO: 2708 - RNA, 121 nt, Homo sapiens
gaacacagugaaugugggagcuguguggagccgggaagggggaggguuggagcccccagaaacuggcucuuccagcugucucaguguccugcccaccgcagaacccccaccucacugguuc

SEQ ID NO: 2709 - RNA, 22 nt, Homo sapiens
cugagccgaguagggaggggac

SEQ ID NO: 2710 - RNA, 72 nt, Homo sapiens
ucccucuuucccccugguuuggcacauaccuccuucagggagccugagccgaguagggaggggacugaggga

SEQ ID NO: 2711 - RNA, 22 nt, Homo sapiens
cuguggaaaggagagaggagac

SEQ ID NO: 2712 - RNA, 90 nt, Homo sapiens
uguagguagccuguggaaaggagagaggagaccagaguagaccaacuagaucuccuagcucaucucuucauucauucaugcaugccugca

SEQ ID NO: 2713 - RNA, 22 nt, Homo sapiens
ccuugauuucacacuugggcua

SEQ ID NO: 2714 - RNA, 104 nt, Homo sapiens
ccuccaguuuggaguuggcacaguccaagacugaaaucaaggucaagcccuagggacuggaccuugauuucacacuugggcuauguaugugcccaguggggagg

SEQ ID NO: 2715 - RNA, 22 nt, Homo sapiens
ggagguagcagcguuggcgguc

SEQ ID NO: 2716 - RNA, 75 nt, Homo sapiens
gccugcggagguagcagcguuggcggucccucaggcucuagcuugaccgccaccuccgucugcuccuccgccagc

SEQ ID NO: 2717 - RNA, 22 nt, Homo sapiens
uaauacuccuaguggggggggu

SEQ ID NO: 2718 - RNA, 95 nt, Homo sapiens
gaucauguaaugggcagcuaauacuccuagugggggggguuccuaauuuggcugcucuccccacuuuuguauuguuaaggcaccgaggcaugauc

SEQ ID NO: 2719 - RNA, 22 nt, Homo sapiens
uaggagcaugugugggggugug

SEQ ID NO: 2720 - RNA, 73 nt, Homo sapiens
gugcgcuaggagcaugugugggggugugguacagagaacucucuuuccaccagcucauacaguucuaaagcac

SEQ ID NO: 2721 - RNA, 22 nt, Homo sapiens
uaucuugaaggaggaggaauaa

SEQ ID NO: 2722 - RNA, 67 nt, Homo sapiens
ccuuucaauuugucuuucccaagguggcucuuuauuuaagagcuaucuugaaggaggaggaauaagg

SEQ ID NO: 2723 - RNA, 22 nt, Homo sapiens
ggaggagccacagccugguaac

SEQ ID NO: 2724 - RNA, 65 nt, Homo sapiens
ggaggagccacagccugguaacagggugacuucuggagucugggugcaggcugugcgcuccugcc

SEQ ID NO: 2725 - RNA, 22 nt, Homo sapiens
uauggacauaacuggggcgcug

SEQ ID NO: 2726 - RNA, 75 nt, Homo sapiens
aucaugcuauggacauaacuggggcgcuggauguuuauucuuucucuccagugagccccaguaugucuuaaugau

SEQ ID NO: 2727 - RNA, 22 nt, Homo sapiens
ucagucuugggucggguuuucu

SEQ ID NO: 2728 - RNA, 88 nt, Homo sapiens
gccucaaugcuuauaagagaaaaccaaggccugagcuggguagucacagaauggcucagucuugggucggguuuucuaagcacugggc

SEQ ID NO: 2729 - RNA, 22 nt, Homo sapiens
ucagcugccuggagugggugag

SEQ ID NO: 2730 - RNA, 70 nt, Homo sapiens
ggcucagcugccuggagugggugagcagaccagaagcaugacccugccccacccccagccagcugcagcc

SEQ ID NO: 2731 - RNA, 22 nt, Homo sapiens
ucauucucauuccaagacguuu

SEQ ID NO: 2732 - RNA, 96 nt, Homo sapiens
gccacaggaaccacaagcagcucauucucauuccaagacguuuuguaaauaaacuaaggaaaugugugggggaagggaagucugcuuuuccugugc

SEQ ID NO: 2733 - RNA, 22 nt, Homo sapiens
uggagacgcggcccuguuggag

SEQ ID NO: 2734 - RNA, 68 nt, Homo sapiens
guguauucuacagugcacgugucuccaguguggcucggaggcuggagacgcggcccuguuggaguaac

SEQ ID NO: 2735 - RNA, 22 nt, Homo sapiens
uggaggcagggccuuugugaag

SEQ ID NO: 2736 - RNA, 95 nt, Homo sapiens
cucaucugucuguugggcuggaggcagggccuuugugaaggcggguggugcucagaucgccucugggcccuuccuccagccccgaggcggauuca

SEQ ID NO: 2737 - RNA, 22 nt, Homo sapiens
ugggagaggguuguuuacuccu

SEQ ID NO: 2738 - RNA, 89 nt, Homo sapiens
accaugcuguaguguguguaaacauccuacacucucagcugugagcucaagguggcugggagaggguuguuuacuccuucugccaugga

SEQ ID NO: 2739 - RNA, 22 nt, Homo sapiens
uagagaauggaaagaggcaggg

SEQ ID NO: 2740 - RNA, 70 nt, Homo sapiens
ugaagauagagaauggaaagaggcagggaagacuaaaaaacucuuugcuucuuucuugucuuggaucuca

SEQ ID NO: 2741 - RNA, 22 nt, Homo sapiens
uccauucagaggaagcuggggg

SEQ ID NO: 2742 - RNA, 70 nt, Homo sapiens
ggcuccauucagaggaagcuggggggauggagaacaguuugucucauccccuccuucccuggugucagcc

SEQ ID NO: 2743 - RNA, 22 nt, Homo sapiens
uagcuggguguagggggcuuuu

SEQ ID NO: 2744 - RNA, 65 nt, Homo sapiens
agauagcuggguguagggggcuuuugaauggaugcacucauuucugcccccuggucuagcuaucu

SEQ ID NO: 2745 - RNA, 22 nt, Homo sapiens
uccuggagagaaggaaacaaau

SEQ ID NO: 2746 - RNA, 124 nt, Homo sapiens
uuugagaaccacuguccuuaaggaauacguagauuuguugccuuuccuggaggcaacaaaucucaugcuccuggagagaaggaaacaaaucuauguacucguuaaggacagugguuacauuaga

SEQ ID NO: 2747 - RNA, 22 nt, Homo sapiens
ucgaggaggaagagugucccag

SEQ ID NO: 2748 - RNA, 77 nt, Homo sapiens
cuucccuucuggccauuuccuccccuccagaauaccacuugggucgcucgaggaggaagagugucccaggggggaag

SEQ ID NO: 2749 - RNA, 22 nt, Homo sapiens
ucucugucaugugagugguccc

SEQ ID NO: 2750 - RNA, 87 nt, Homo sapiens
ugcaguccuggcucucugucaugugaguggucccccuugugcuugguggaauugcuggcagugacaggaaggagauuacagacugua

SEQ ID NO: 2751 - RNA, 22 nt, Homo sapiens
ucugagcccagagcugguggug

SEQ ID NO: 2752 - RNA, 99 nt, Homo sapiens
ccugcccucagagcccuaccaccaguguugggcauuggggcuaggcuggagcugggcucugagcccagagcugguggugguuuccaggccugugggagg

SEQ ID NO: 2753 - RNA, 22 nt, Homo sapiens
ugauuggagcugcggugggugg

SEQ ID NO: 2754 - RNA, 71 nt, Homo sapiens
gcuucccuccaacugacuguccuaaucaggcuccagaggggaggcugauuggagcugcgguggguggaagc

SEQ ID NO: 2755 - RNA, 22 nt, Homo sapiens
uaggcugggcuggggcugcacu

SEQ ID NO: 2756 - RNA, 73 nt, Homo sapiens
uaggcugggcuggggcugcacugagaaaucccaccauguggcuggaguaggaguuuagucucuguccagccug

SEQ ID NO: 2757 - RNA, 22 nt, Homo sapiens
ugaagggcaaggagccagugga

SEQ ID NO: 2758 - RNA, 81 nt, Homo sapiens
cccugaacuuuacuccacuggcugccaugaccccaggccagaucccuggcugaagggcaaggagccaguggaggagaaggg

SEQ ID NO: 2759 - RNA, 20 nt, Homo sapiens
ugaagggcagagggagggaa

SEQ ID NO: 2760 - RNA, 56 nt, Homo sapiens
uucucucccagcucuggucuaaaguaauuuuggugcugaagggcagagggagggaa

SEQ ID NO: 2761 - RNA, 22 nt, Homo sapiens
ugaagggcuggggcuagcucug

SEQ ID NO: 2762 - RNA, 97 nt, Homo sapiens
aggccuggcucagggcugaagggcuggggcuagcucugaccaguucuugcugcucuaccugccagagcuggccagguccuuccaacuucccaggcuu

SEQ ID NO: 2763 - RNA, 22 nt, Homo sapiens
ugagaguugggggaggauaaga

SEQ ID NO: 2764 - RNA, 102 nt, Homo sapiens
uguguguguauauucuggugccuccucuagcuuguagcauucuuaucacaaucaaacagauguugggcugagaguugggggaggauaagaagcugccacaca

SEQ ID NO: 2765 - RNA, 22 nt, Homo sapiens
ugagauacuauuggggagcaug

SEQ ID NO: 2766 - RNA, 88 nt, Homo sapiens
cugaggcugagauacuauuggggagcaugaggggaggggcugauaaaggucugcagagacaguguccccagaagggucucaggcucag

SEQ ID NO: 2767 - RNA, 22 nt, Homo sapiens
ugaggggcaaggaugggcaugc

SEQ ID NO: 2768 - RNA, 75 nt, Homo sapiens
gggccugcccucguugcccucagcaaugugaauggauccaguacuuggagcugaggggcaaggaugggcaugccc

SEQ ID NO: 2769 - RNA, 22 nt, Homo sapiens
uauaaggccugggagggcaggg

SEQ ID NO: 2770 - RNA, 78 nt, Homo sapiens
gcaaucauuuuuccccuucucugcuuuguugucuucgcuuugccaggauauaaggccugggagggcagggauuguugu

SEQ ID NO: 2771 - RNA, 22 nt, Homo sapiens
ugagguuggggcuugggcuucc

SEQ ID NO: 2772 - RNA, 92 nt, Homo sapiens
ccugggucugggagugcugagguuggggcuugggcuuccugcuugucuagaaaagggccaaaucucagcuccagucauuguuggucuccagg

SEQ ID NO: 2773 - RNA, 22 nt, Homo sapiens
ugccaguggggguaggagaggg

SEQ ID NO: 2774 - RNA, 88 nt, Homo sapiens
cguugcaccaccugcuuccuccuccccgcugggacagccaacugggccggcugccaguggggguaggagaggguaugaggggcucacg

SEQ ID NO: 2775 - RNA, 19 nt, Homo sapiens
aagaagugaggcucuugga

SEQ ID NO: 2776 - RNA, 71 nt, Homo sapiens
ucuaagacuccucacauuuucugggaucucaaagaaagauuucccuaugaggaagaagugaggcucuugga

SEQ ID NO: 2777 - RNA, 22 nt, Homo sapiens
ugcuggguggcagauuacacag

SEQ ID NO: 2778 - RNA, 86 nt, Homo sapiens
agcuauaaaauagcugcuggguggcagauuacacaggcucuagaauaaaaaggugagaauuugccacccagcuucuaccaugagcu

SEQ ID NO: 2779 - RNA, 22 nt, Homo sapiens
ugggagggaggggccagggaua

SEQ ID NO: 2780 - RNA, 70 nt, Homo sapiens
gggcugggagggaggggccagggauaauuuaugauaucauugcucccccgccgcacuuacuucccagccc

SEQ ID NO: 2781 - RNA, 22 nt, Homo sapiens
ugggagggggcaacugcugagu

SEQ ID NO: 2782 - RNA, 72 nt, Homo sapiens
gcauguucucagcaaucaguccucccccagcgccuguccccagagcugggagggggcaacugcugagucagc

SEQ ID NO: 2783 - RNA, 22 nt, Homo sapiens
ugggaguugguggggugggaug

SEQ ID NO: 2784 - RNA, 79 nt, Homo sapiens
uuaggcuaagcugggaguugguggggugggauguggggcauuggccccauuagucccaguuuaccaggcccaggucuga

SEQ ID NO: 2785 - RNA, 22 nt, Homo sapiens
ugggauggggguugagaaggag

SEQ ID NO: 2786 - RNA, 74 nt, Homo sapiens
ugggauggggguugagaaggagaaaaauagaacgcuuucaucgcuucucugauuuuccuucucccucucuucua

SEQ ID NO: 2787 - RNA, 22 nt, Homo sapiens
uaugggggguccugggaggaga

SEQ ID NO: 2788 - RNA, 77 nt, Homo sapiens
uaggcacuccaucuugggauuccugaugucaucuauuuugucacgcaggauaugggggguccugggaggagagucug

SEQ ID NO: 2789 - RNA, 22 nt, Homo sapiens
uuggguuccuggcaugcugauu

SEQ ID NO: 2790 - RNA, 97 nt, Homo sapiens
cucaggugcucuggcugcuuggguuccuggcaugcugauuugugacuuaagauuaaaaucacauugccagggauuaccacgcaaccacgaccuuggc

SEQ ID NO: 2791 - RNA, 22 nt, Homo sapiens
ugggcauuuuggggugggagaa

SEQ ID NO: 2792 - RNA, 68 nt, Homo sapiens
ucugcugggcauuuuggggugggagaagauucuagauacuucuccaaacuccaaaaugaauaugcgga

SEQ ID NO: 2793 - RNA, 22 nt, Homo sapiens
uggugcggcagguuuuucaugc

SEQ ID NO: 2794 - RNA, 83 nt, Homo sapiens
cccagagcuggugcggcagguuuuucaugcaagaucaagcagauuauagaaugaaaagugucugcugcauuucagcaacuggg

SEQ ID NO: 2795 - RNA, 22 nt, Homo sapiens
ugggggcagagaggaggaauuu

SEQ ID NO: 2796 - RNA, 94 nt, Homo sapiens
cugggcugggggcagagaggaggaauuucaacaugaaauguuuuguucauuaacagagaacauagggggaaauucccuuucugccugggcccag

SEQ ID NO: 2797 - RNA, 22 nt, Homo sapiens
uggggggcuacugacagaggag

SEQ ID NO: 2798 - RNA, 79 nt, Homo sapiens
gggggcugcuggggggcuacugacagaggagacaucuucauccaucucucugugagaugccuuccugagccuugcgccc

SEQ ID NO: 2799 - RNA, 22 nt, Homo sapiens
uggggguggccucaggagccau

SEQ ID NO: 2800 - RNA, 70 nt, Homo sapiens
agaguggccuugaagcuccccccaacaacccuggcugccggggcuggggguggccucaggagccaucucu

SEQ ID NO: 2801 - RNA, 22 nt, Homo sapiens
uggucuaucauuugggugggga

SEQ ID NO: 2802 - RNA, 105 nt, Homo sapiens
ugggcacccuguuugaggaggcuggucuaucauuuggguggggaaacauuuagggaacugagggggucccaaucugaggagacuggucuacuauugaggggccca

SEQ ID NO: 2803 - RNA, 22 nt, Homo sapiens
ugguguggauggggguuggggu

SEQ ID NO: 2804 - RNA, 134 nt, Homo sapiens
uugaggcauuuuacuucuuaucccaggagagcugguguggauggggguuggggucucuuuaugaagagcaccuuccuccacccacaacuaguuucuuuuagcaccuucuugggaagagagaagcaauaccacaa

SEQ ID NO: 2805 - RNA, 22 nt, Homo sapiens
ugguuguggggaaaaugagaug

SEQ ID NO: 2806 - RNA, 90 nt, Homo sapiens; identical to SEQ ID NO: 792

SEQ ID NO: 2807 - RNA, 22 nt, Homo sapiens
ugugguuacucagaaaccagca

SEQ ID NO: 2808 - RNA, 65 nt, Homo sapiens
ugcugugguuacucagaaaccagcaacuaugucagguuccugguuuacagaguaaaccaauagca

SEQ ID NO: 2809 - RNA, 22 nt, Homo sapiens
uguguggugggggcuuugagcu

SEQ ID NO: 2810 - RNA, 79 nt, Homo sapiens
cugccgucuugaagguucuaccacaccaguucaucacuaagccugcuguguggugggggcuuugagcuguuaacgggag

SEQ ID NO: 2811 - RNA, 22 nt, Homo sapiens
ugugugugggaggcacuugcac

SEQ ID NO: 2812 - RNA, 111 nt, Homo sapiens
agggguaacauuuuaaagcugugugugggaggcacuugcacaaaauauuuugucaacaggauuucugcguacaccucucacacacugcuuaggaaauuuaccccagaauag

SEQ ID NO: 2813 - RNA, 22 nt, Homo sapiens
uguuucuagucugguuuuguga

SEQ ID NO: 2814 - RNA, 91 nt, Homo sapiens
ggaauauuccucagcuguuucuagucugguuuugugacuagcuaucuuggaauaguuaugccagaucugaagcaacugaggcaguauggcc

SEQ ID NO: 2815 - RNA, 22 nt, Homo sapiens
uuaggguaggaugguuguaggu

SEQ ID NO: 2816 - RNA, 81 nt, Homo sapiens
auggccguuucuggcuuaggguaggaugguuguaggugcuggcaacacagucaccugccacuuccugccucagucugccau

SEQ ID NO: 2817 - RNA, 22 nt, Homo sapiens
uugaauuugucaaaugucacac

SEQ ID NO: 2818 - RNA, 65 nt, Homo sapiens
ugcuugaauuugucaaaugucacacacucuauuucaaacaugugagauuugacaucaugugagca

SEQ ID NO: 2819 - RNA, 22 nt, Homo sapiens
uugggaggaggaguugauaggu

SEQ ID NO: 2820 - RNA, 65 nt, Homo sapiens
gacgcuugggaggaggaguugauaggugacuuaauguuaaaucuggguucccucccccaauuguc

SEQ ID NO: 2821 - RNA, 22 nt, Homo sapiens
uugucugcaggaggugaaguga

SEQ ID NO: 2822 - RNA, 108 nt, Homo sapiens
guaaugcuuuucccugcacugcuugucugcaggaggugaagugaaaucugcaagaguccugcucgcucaaggccugcauacaggaaagaagcaggggaaaagcguuac

SEQ ID NO: 2823 - RNA, 22 nt, Homo sapiens
uuuaggugguugcacaggcagg

SEQ ID NO: 2824 - RNA, 104 nt, Homo sapiens
uucauuuucacaaaccugccuguggguuuaccacuuauaagcacugugauacucagagccuggcuuuaggugguugcacaggcagggauuuggagggaaaugaa

SEQ ID NO: 2825 - RNA, 22 nt, Homo sapiens
auaggaucagggguuuggggug

SEQ ID NO: 2826 - RNA, 81 nt, Homo sapiens
ucauggagggaaauaggaucagggguuuggggugaguggccucgcuugcccccggacuccuggcccuccuuuuuucccugg

SEQ ID NO: 2827 - RNA, 22 nt, Homo sapiens
uuucuagggcacagacagugca

SEQ ID NO: 2828 - RNA, 68 nt, Homo sapiens
cagcuuucuagggcacagacagugcaaaauggcucaggccagaauguaguuuagguuucagaagggug

SEQ ID NO: 2829 - RNA, 22 nt, Homo sapiens
uuugcggguggacgagggucua

SEQ ID NO: 2830 - RNA, 81 nt, Homo sapiens
ugugcugcuuugcggguggacgagggucuacacgcugccuucgcagagacaggcccuccuuugcccgugaauggcagcgca

SEQ ID NO: 2831 - RNA, 22 nt, Homo sapiens
uuugcuuagcagugcugggaag

SEQ ID NO: 2832 - RNA, 94 nt, Homo sapiens
uccuuuuccuccuuuccuuccuagcacugcuaagcaagacacagggagugacagcuuugcuuagcagugcugggaaggaaggcagagaaaagga

SEQ ID NO: 2833 - RNA, 22 nt, Homo sapiens
uuuuaauugcaauuaugguccc

SEQ ID NO: 2834 - RNA, 59 nt, Homo sapiens; identical to SEQ ID NO: 2530

SEQ ID NO: 2835 - RNA, 22 nt, Homo sapiens
uuuugggagcuggccguaggca

SEQ ID NO: 2836 - RNA, 82 nt, Homo sapiens
cagcuguggggcuuuugggagcuggccguaggcaagggagugccaagugucugcagucagaggccaggagccugggaggcug

SEQ ID NO: 2837 - RNA, 22 nt, Homo sapiens
aaaagggaccagggaacaucug

SEQ ID NO: 2838 - RNA, 81 nt, Homo sapiens
cugggcagacagguguccccugguccccuuuccucaccccaauccaggaaaagggaccagggaacaucugcuaauucucag

SEQ ID NO: 2839 - RNA, 22 nt, Homo sapiens
aaaaugggagggaaugguggug

SEQ ID NO: 2840 - RNA, 76 nt, Homo sapiens
uccugccacugccucaucucuuuccacuccaaagguuggggucuaugaaggaaaaugggagggaauggugguggga

SEQ ID NO: 2841 - RNA, 22 nt, Homo sapiens
aaacagacagagccaggugggu

SEQ ID NO: 2842 - RNA, 92 nt, Homo sapiens
gcagccgaggaaacagacagagccagguggguguguauacugguaggagaccucuccuggcucuuucuauuuucuuagugaaauagggcugc

SEQ ID NO: 2843 - RNA, 22 nt, Homo sapiens
aaagguggggagcuggggaaga

SEQ ID NO: 2844 - RNA, 88 nt, Homo sapiens
uuuguccaucuagccccagcuuuccccacuugucugccuuuuucucuggaggaaagguggggagcuggggaagagguguuaugacaga

SEQ ID NO: 2845 - RNA, 22 nt, Homo sapiens
ggagagguuacccgagcaacuu

SEQ ID NO: 2846 - RNA, 79 nt, Homo sapiens
ugguacucggggagagguuacccgagcaacuuugcaucuggacgacgaauguugcucggugaaccccuuuucgguauca

SEQ ID NO: 2847 - RNA, 22 nt, Homo sapiens
caggauuguccugcagaucaac

SEQ ID NO: 2848 - RNA, 116 nt, Homo sapiens
caacuacagccacuacuacaggaccaucgaggaccugcgggacaagauucuuggugccaccauugagaacgccaggauuguccugcagaucaacaaugcucaacuggcugcagaug

SEQ ID NO: 2849 - RNA, 22 nt, Homo sapiens
cuuauucaggaagguguuacuu

SEQ ID NO: 2850 - RNA, 124 nt, Homo sapiens
gccaccaccaucagccauacuauguguagugccuuauucaggaagguguuacuuaauagauuaauauuuguaaggcacccuucugaguagaguaaugugcaacauggacaacauuugugguggc

SEQ ID NO: 2851 - RNA, 22 nt, Homo sapiens
aacugugaggaccagggguagc

SEQ ID NO: 2852 - RNA, 88 nt, Homo sapiens
ggagcuagcagagugggaacugugaggaccagggguagcugguggugcugacuucagcacuccugaguccuggcccucccucuguccc

SEQ ID NO: 2853 - RNA, 22 nt, Homo sapiens
aaggauuuagggacaggcuuug

SEQ ID NO: 2854 - RNA, 106 nt, Homo sapiens
gugcaaaugaaagugggcaaaaagccugucccuaagucccucccagccuuccagaguuggugccaggaaggauuuagggacaggcuuugugcccacuuuuggcuac

SEQ ID NO: 2855 - RNA, 22 nt, Homo sapiens
aaggcgauggggaaauguaggc

SEQ ID NO: 2856 - RNA, 73 nt, Homo sapiens
gcuuggaaggcgauggggaaauguaggcacuuggaagaaguugcgcugcuguuucugcaccucccuuccaagu

SEQ ID NO: 2857 - RNA, 22 nt, Homo sapiens
aagguagaggucaccggcacau

SEQ ID NO: 2858 - RNA, 77 nt, Homo sapiens
gguugagggaagguagaggucaccggcacauaguucauuugcaaauauaugcugaugacaucuaucuucccucaacc

SEQ ID NO: 2859 - RNA, 21 nt, Homo sapiens
aagguuuuuaggcaggagagc

SEQ ID NO: 2860 - RNA, 74 nt, Homo sapiens
gcuuucuugcuagggugcuuucuucuaaccccagaagugauggggagccauggaagguuuuuaggcaggagagc

SEQ ID NO: 2861 - RNA, 22 nt, Homo sapiens
aaguguuuauaggcaggggccc

SEQ ID NO: 2862 - RNA, 76 nt, Homo sapiens
aaguguuuauaggcaggggcccaauugugccuaugccaugcaaguuguuggcacuuggcccagccucaggacacuu

SEQ ID NO: 2863 - RNA, 21 nt, Homo sapiens
aauaauuccagguaggaauuu

SEQ ID NO: 2864 - RNA, 84 nt, Homo sapiens
aaauuucugccuggaaucccugauguagugucucugcucccuccuuucuggcacagagacaggaauaauuccagguaggaauuu

SEQ ID NO: 2865 - RNA, 22 nt, Homo sapiens
aaggggggccgauacacuguac

SEQ ID NO: 2866 - RNA, 84 nt, Homo sapiens
ugugcagugggaaggggggccgauacacuguacgagagugaguagcaggucucacagugaaccggucucuuucccuacuguguc

SEQ ID NO: 2867 - RNA, 22 nt, Homo sapiens
cacucaaacugugggggcacuu

SEQ ID NO: 2868 - RNA, 67 nt, Homo sapiens
guggcacucaaacugugggggcacuuucugcucucuggugaaagugccgccaucuuuugaguguuac

SEQ ID NO: 2869 - RNA, 22 nt, Homo sapiens
cagggacagcaaaggggugcuc

SEQ ID NO: 2870 - RNA, 110 nt, Homo sapiens
ucaccuggccaugugacuugugggcuucccuuugucauccuucgccuagggcucugagcagggcagggacagcaaaggggugcucaguugucacuucccacagcacggag

SEQ ID NO: 2871 - RNA, 22 nt, Homo sapiens
aaucgggccgggaguuggguca

SEQ ID NO: 2872 - RNA, 76 nt, Homo sapiens
ccucggaccuggcuaagcuuccaaggcccuccuggagggccaggaaucgggccgggaguugggucaggcucugagg

SEQ ID NO: 2873 - RNA, 22 nt, Homo sapiens
aaucgggccgggguuugggcca

SEQ ID NO: 2874 - RNA, 78 nt, Homo sapiens
uccucggaccuggcuaagcuuccaaggcccuccuggagggccaggaaucgggccgggguuugggccaggcucugagga

SEQ ID NO: 2875 - RNA, 22 nt, Homo sapiens
aauggaggagggauggauuguu

SEQ ID NO: 2876 - RNA, 117 nt, Homo sapiens
ugaucuuuucaguauucugugacuugauugguuguccauucuauuucaguucucacuuaucuggggaauggaggagggauggauuguuaauuaauaugcagaauacugaaaaggcca

SEQ ID NO: 2877 - RNA, 22 nt, Homo sapiens
aauggggaguuggguagggcug

SEQ ID NO: 2878 - RNA, 88 nt, Homo sapiens
uucuacagguaaggcuuguccguauucccucuucucucaccucuggggaggaauggggaguuggguagggcugauggagcuuguagaa

SEQ ID NO: 2879 - RNA, 22 nt, Homo sapiens
aaugggguggugcauggagagg

SEQ ID NO: 2880 - RNA, 73 nt, Homo sapiens
ucccaaccaucuccaucacccggcuccccuccuggucccugcugggaaugggguggugcauggagagguggga

SEQ ID NO: 2881 - RNA, 22 nt, Homo sapiens
aauggucacuagggaaggggcg

SEQ ID NO: 2882 - RNA, 85 nt, Homo sapiens
gguugacuucuggaauggucacuagggaaggggcgccagaggugcagccggugccucugacccuuuuggucgcuaggagucagcc

SEQ ID NO: 2883 - RNA, 22 nt, Homo sapiens
acacaugggaauggggccgggg

SEQ ID NO: 2884 - RNA, 119 nt, Homo sapiens
ggaagacucugcccacuucaaaucccugccuggggaaggacacaugggaauggggccgggggaaaaggcgggccaccucgggccuucgucaccugugucagcuccuagggauugucucc

SEQ ID NO: 2885 - RNA, 22 nt, Homo sapiens
acgugagugucugaugguggug

SEQ ID NO: 2886 - RNA, 115 nt, Homo sapiens
gaaguaagauauacaugaugaaggagcaucagcacagacagccaacguucaggcaugggggagaguaaggacgugagugucugauggugguggucacuugucaguguucugcuuc

SEQ ID NO: 2887 - RNA, 21 nt, Homo sapiens
acugagggaaugggggaugag

SEQ ID NO: 2888 - RNA, 70 nt, Homo sapiens
uuccucuccugcucucaguccauccucugcuggccacagcaauuccgggacugagggaaugggggaugag

SEQ ID NO: 2889 - RNA, 22 nt, Homo sapiens
acugagggcaugggggaugagu

SEQ ID NO: 2890 - RNA, 109 nt, Homo sapiens
ugggucccuggacacgaccucgucuccugcucucacuccauucucuaguggcagcagccacucugggacugagggcaugggggaugaguugaaagaacagugggaccca

SEQ ID NO: 2891 - RNA, 22 nt, Homo sapiens
acugggccaagagcgggggcac

SEQ ID NO: 2892 - RNA, 58 nt, Homo sapiens
gacugggccaagagcgggggcacuacgggcaucgaggcuuucgccuuugggucagggc

SEQ ID NO: 2893 - RNA, 22 nt, Homo sapiens
agcaggcuccgggggacaggga

SEQ ID NO: 2894 - RNA, 109 nt, Homo sapiens
cuguugcgcuguccuuccucuggggagcaggcuccgggggacagggaaaagcacacaaggaacuuguccucuagggccugcagucucaugggagagugacaugcaccag

SEQ ID NO: 2895 - RNA, 22 nt, Homo sapiens
aggaagacuuguguuggacccc

SEQ ID NO: 2896 - RNA, 83 nt, Homo sapiens
ugugaggcccugguuggacacauguccuccuccugucccuucagauggugagucuggaggaagacuuguguuggacccccaca

SEQ ID NO: 2897 - RNA, 22 nt, Homo sapiens
aggaagguauacagaauuguaa

SEQ ID NO: 2898 - RNA, 66 nt, Homo sapiens
gggaggaagguauacagaauuguaaauggcaugcuccaaacuuauauucuugauuacuuucuuccu

SEQ ID NO: 2899 - RNA, 22 nt, Homo sapiens
aggaggccugggaugagcagga

SEQ ID NO: 2900 - RNA, 68 nt, Homo sapiens
ggaggaggccugggaugagcaggagaaggacgagguccaccacccugcuccauuuccaagccucuccc

SEQ ID NO: 2901 - RNA, 22 nt, Homo sapiens
aggaugggggaggcaaagccaa

SEQ ID NO: 2902 - RNA, 68 nt, Homo sapiens
uggaggaugggggaggcaaagccaaguuuuuggugacauuagauugauuuugguacccaccuccucca

SEQ ID NO: 2903 - RNA, 22 nt, Homo sapiens
aggcaugaaaaagguauugcug

SEQ ID NO: 2904 - RNA, 68 nt, Homo sapiens
aacagcaaugccuuaucuaugguucucugugcaucuggguguggaggcaugaaaaagguauugcuguu

SEQ ID NO: 2905 - RNA, 22 nt, Homo sapiens
aggcugagacucugaauuuuuc

SEQ ID NO: 2906 - RNA, 90 nt, Homo sapiens
uuaauuucaccagggaggcugagacucugaauuuuucccccuugcaggagggaauaauuuagauuuucuuccaucccugucagaaguuga

SEQ ID NO: 2907 - RNA, 15 nt, Homo sapiens
aggcugaggccccuc

SEQ ID NO: 2908 - RNA, 56 nt, Homo sapiens
gaggggucucugccucuacccaggacucuuucaugaccaggaggcugaggccccuc

SEQ ID NO: 2909 - RNA, 22 nt, Homo sapiens
uguguguacaccuaaccuacac

SEQ ID NO: 2910 - RNA, 84 nt, Homo sapiens; identical to SEQ ID NO: 2232

SEQ ID NO: 2911 - RNA, 22 nt, Homo sapiens
agucaggggagggguggagaga

SEQ ID NO: 2912 - RNA, 86 nt, Homo sapiens
gugcugaggugggagucaggggagggguggagagaauugagggguugggccaggccucccaccuccuagggcucccgcaccagcau

SEQ ID NO: 2913 - RNA, 22 nt, Homo sapiens
agggacgggacgcggugcagug

SEQ ID NO: 2914 - RNA, 96 nt, Homo sapiens
cgggccccgggcgggcgggagggacgggacgcggugcaguguuguuuuuucccccgccaauauugcacucgucccggccuccggcccccccggccc

SEQ ID NO: 2915 - RNA, 22 nt, Homo sapiens
agggaggagguuggggugaagg

SEQ ID NO: 2916 - RNA, 76 nt, Homo sapiens
gggaggggagggaggagguuggggugaaggaaaccaaccuacugcaccuccauccccaacccugccuuccccgccc

SEQ ID NO: 2917 - RNA, 22 nt, Homo sapiens
agggaggugguuuaggcagaag

SEQ ID NO: 2918 - RNA, 98 nt, Homo sapiens
gaguucucacucuguucugcuuccuaaaucaccucccuccaggagauucugcacuguaggagggaggugguuuaggcagaagaacagagugaggacuc

SEQ ID NO: 2919 - RNA, 22 nt, Homo sapiens
agggaucuggggcagauggugg

SEQ ID NO: 2920 - RNA, 59 nt, Homo sapiens
agggaucuggggcagauggugguagcacaaccuagagcucacuucugccacagaugacu

SEQ ID NO: 2921 - RNA, 22 nt, Homo sapiens
agggcggaguagugaggagacc

SEQ ID NO: 2922 - RNA, 71 nt, Homo sapiens
aggggcuccuccacuccagguccuugggguauguguacccccagaggagggcggaguagugaggagacccu

SEQ ID NO: 2923 - RNA, 22 nt, Homo sapiens
aggggaacaggcuuggugacga

SEQ ID NO: 2924 - RNA, 69 nt, Homo sapiens
ggaggggaacaggcuuggugacgagggccuucccugcccccaccugucacuccagccuggagccccucc

SEQ ID NO: 2925 - RNA, 22 nt, Homo sapiens
aggggugaggagagguggcaag

SEQ ID NO: 2926 - RNA, 78 nt, Homo sapiens
gccuugugacucccuaccaucuuuaguucucucugucgccuguugggaggggugaggagagguggcaaggagcaaggc

SEQ ID NO: 2927 - RNA, 22 nt, Homo sapiens
agggguggcagagugguaagag

SEQ ID NO: 2928 - RNA, 72 nt, Homo sapiens
gguugggagggguggcagagugguaagagauguuaucaauaaucucccuaccucuucuccucccucccugcu

SEQ ID NO: 2929 - RNA, 22 nt, Homo sapiens
aggggugggggaccccaggaga

SEQ ID NO: 2930 - RNA, 72 nt, Homo sapiens
ggauggaggggugggggaccccaggagacucaagccucugaagccuccuguccugucccccugcccaccccc

SEQ ID NO: 2931 - RNA, 18 nt, Homo sapiens
agguaaagcagaaaguga

SEQ ID NO: 2932 - RNA, 66 nt, Homo sapiens
uuauuuucugccauuuaccuucaaaccaauucuuugacaguggggaggagguaaagcagaaaguga

SEQ ID NO: 2933 - RNA, 22 nt, Homo sapiens
aggucaggguggccaugaguua

SEQ ID NO: 2934 - RNA, 66 nt, Homo sapiens
gggaggucaggguggccaugaguuaguuuuuagauauuuugaguuggaggcguucccugaccuccc

SEQ ID NO: 2935 - RNA, 22 nt, Homo sapiens
agugaggguagaggcaggagug

SEQ ID NO: 2936 - RNA, 91 nt, Homo sapiens
caugauuaagcaggggagugaggguagaggcaggagugcaaaauuguaaaguuuuagcuuuuugagcuauucucagucccugugugguaug

SEQ ID NO: 2937 - RNA, 22 nt, Homo sapiens
aguuaggcccaagaaccagggu

SEQ ID NO: 2938 - RNA, 68 nt, Homo sapiens
uuuggaguuaggcccaagaaccaggguuugaagucuucuggucucagggcuuugggccuggcuuugga

SEQ ID NO: 2939 - RNA, 22 nt, Homo sapiens
aguuguaguuucggaugcguuc

SEQ ID NO: 2940 - RNA, 65 nt, Homo sapiens
gggaguuguaguuucggaugcguuccccgucaacgcggcggcggcggucguggacuacaacuccc

SEQ ID NO: 2941 - RNA, 16 nt, Homo sapiens
aguuuuuuggugccuu

SEQ ID NO: 2942 - RNA, 71 nt, Homo sapiens
aaggucuaacuaaaacacuccccuacgaggugaauaaaauaccucacaacaccggaguuuuuuggugccuu

SEQ ID NO: 2943 - RNA, 22 nt, Homo sapiens
auacugagggugagucuggggc

SEQ ID NO: 2944 - RNA, 83 nt, Homo sapiens
agagccaguggcccuggauucacaucccuuacuggucccauuuuacaguuaaggauacugagggugagucuggggccagcucu

SEQ ID NO: 2945 - RNA, 20 nt, Homo sapiens
augggagcaguggcuuucag

SEQ ID NO: 2946 - RNA, 58 nt, Homo sapiens
cugggagcuuuugcuuucuacuuuaagaauaaaauuggaugggagcaguggcuuucag

SEQ ID NO: 2947 - RNA, 22 nt, Homo sapiens
augggaucugggggugaggggc

SEQ ID NO: 2948 - RNA, 69 nt, Homo sapiens
gccccucuccggaauccccuauccuacacccauguagcucuuugaggaugggaucugggggugaggggc

SEQ ID NO: 2949 - RNA, 22 nt, Homo sapiens
augggggaaggagagccugugu

SEQ ID NO: 2950 - RNA, 103 nt, Homo sapiens
agucaccaauaccagauugcuguuuucauagguuuuuucccccauuuagugguuuauuugacggaugggggaaggagagccugugugggaauuugaacugacu

SEQ ID NO: 2951 - RNA, 22 nt, Homo sapiens
augggggugggguggagcagaa

SEQ ID NO: 2952 - RNA, 68 nt, Homo sapiens
ggaaucaucucucugcccacaguuucauuccagggaccugaagggaugggggugggguggagcagaac

SEQ ID NO: 2953 - RNA, 68 nt, Homo sapiens; identical to SEQ ID NO: 2952

SEQ ID NO: 2954 - RNA, 116 nt, Homo sapiens
ggcaucacucagccugcuccugguuguggguccauuaucugcuccuaauauugucuuucgucucgggauugugaacagauaaggaacccacagccaggagcaggcugggccuggcc

SEQ ID NO: 2955 - RNA, 22 nt, Homo sapiens
caaggccagagggcauucaagu

SEQ ID NO: 2956 - RNA, 62 nt, Homo sapiens
ggcaaggccagagggcauucaagugacacucaugccaccugggagcugccaccuggccuucc

SEQ ID NO: 2957 - RNA, 22 nt, Homo sapiens
ucgggguuuugagggcgagaug

SEQ ID NO: 2958 - RNA, 83 nt, Homo sapiens
guggucucagaaucgggguuuugagggcgagaugaguuuauguuuuauccaacuggcccucaaagucccgcuuuuggggucau

SEQ ID NO: 2959 - RNA, 22 nt, Homo sapiens
cagagaaggaagcagccagaga

SEQ ID NO: 2960 - RNA, 68 nt, Homo sapiens
ggcagagaaggaagcagccagagagaagagcacccgccccaccccugcuggcagcuuccuccuucucc

SEQ ID NO: 2961 - RNA, 22 nt, Homo sapiens
cagacaggcagcaggagggagu

SEQ ID NO: 2962 - RNA, 116 nt, Homo sapiens
ugguggggggagcugggggcgcgggcagacaggcagcaggagggagucgcaaagccgugccuggucucguuuccucgcucgccuuuccccugcgcccccucccugcacccccucca

SEQ ID NO: 2963 - RNA, 22 nt, Homo sapiens
caguggaggguggcugggagug

SEQ ID NO: 2964 - RNA, 162 nt, Homo sapiens
cagcauguucccucucaagagaaggaagagauguccgcaugucuccauccaugcucuacugucaaaucagucacuuuuccccgaggcuagagugaggcaguggaggguggcugggaguguuauguuaaugggucuucacuuggaagggaacgucaagaguug

SEQ ID NO: 2965 - RNA, 22 nt, Homo sapiens
cauucccuggaguugggcaauc

SEQ ID NO: 2966 - RNA, 234 nt, Homo sapiens
cagagcccuggccagggccaguacacugcccaacuccagaggacccuguccccuccuugugaacggcauucccuggaguugggcaaucuugugggccugcuccuucccuacccucugcagagcccuggccagggccaguacacugcccaacuccagaggacccuguccccuccuugugaacggcauucccuggaguugggcaaucuugugggccugcuccuucccuacccucug

SEQ ID NO: 2967 - RNA, 22 nt, Homo sapiens
gccacacgggguaauaauaacu

SEQ ID NO: 2968 - RNA, 62 nt, Homo sapiens
ggccacacgggguaauaauaacuugucgauaagcugcgcggguuauuuuuaugccgcaagcc

SEQ ID NO: 2969 - RNA, 22 nt, Homo sapiens
gagaggguagauuuuggaagua

SEQ ID NO: 2970 - RNA, 71 nt, Homo sapiens
gagugggagaggguagauuuuggaaguagucacaguugauccuauaguuccugguguaccuccucccacuc

SEQ ID NO: 2971 - RNA, 22 nt, Homo sapiens
ggcggggagggagcuguggcuu

SEQ ID NO: 2972 - RNA, 113 nt, Homo sapiens
ggcgcucggcaggggugcggcguggcggggagggagcuguggcuuugauuucagcugaucugagccccagccucccucccccagcagagccgcuuggcccagccccauaugcc

SEQ ID NO: 2973 - RNA, 22 nt, Homo sapiens
cgggagguaaggagcaaggcau

SEQ ID NO: 2974 - RNA, 78 nt, Homo sapiens
ggggcgggagguaaggagcaaggcaugaagaaucuggagacucagacuaugucacgucuugcguucccugcccgccuc

SEQ ID NO: 2975 - RNA, 22 nt, Homo sapiens
cuaggaggguuggguggaggca

SEQ ID NO: 2976 - RNA, 74 nt, Homo sapiens
cccugcccugccuccaccccgccuggccugacccagccagggcucuaggaggguuggguggaggcaaagugggg

SEQ ID NO: 2977 - RNA, 22 nt, Homo sapiens
cucggggcuuaugggcaguuuu

SEQ ID NO: 2978 - RNA, 66 nt, Homo sapiens
gugggauggcccauguuucaccagcacucagaugcccuggggcucggggcuuaugggcaguuuugc

SEQ ID NO: 2979 - RNA, 22 nt, Homo sapiens
cucuggcuuaggguuuagaagg

SEQ ID NO: 2980 - RNA, 84 nt, Homo sapiens
ggccugaguccuuguagacucugaguacggugcugagcagggaagagacaggcucuggcuuaggguuuagaaggaacacaggcu

SEQ ID NO: 2981 - RNA, 22 nt, Homo sapiens
gcugggucuuugcgggcgagau

SEQ ID NO: 2982 - RNA, 88 nt, Homo sapiens
cgaggaugggagcugagggcugggucuuugcgggcgagaugagggugucggaucaacuggccuacaaagucccaguucucggcccccg

SEQ ID NO: 2983 - RNA, 22 nt, Homo sapiens
cugggagguggauguuuacuuc

SEQ ID NO: 2984 - RNA, 88 nt, Homo sapiens
accaaguuucaguucauguaaacauccuacacucagcuguaauacauggauuggcugggagguggauguuuacuucagcugacuugga

SEQ ID NO: 2985 - RNA, 22 nt, Homo sapiens
cucugggguggcuguggaaaug

SEQ ID NO: 2986 - RNA, 88 nt, Homo sapiens
ucucuauguuaggcguuucugcagacauccuuggccggaucugaucgcuggcucugggguggcuguggaaauguguagauauuagaga

SEQ ID NO: 2987 - RNA, 22 nt, Homo sapiens
gacagauggcaggaagcagugg

SEQ ID NO: 2988 - RNA, 75 nt, Homo sapiens
gcccacccagcacugcuugcugucacuggcucuauuuccaucacucgggacagauggcaggaagcaguggugggc

SEQ ID NO: 2989 - RNA, 22 nt, Homo sapiens
cugagggcggugccucucuucu

SEQ ID NO: 2990 - RNA, 76 nt, Homo sapiens
ggguggaggaggggcagccagccacugugagcccugaagacauguggggcugagggcggugccucucuucucaccc

SEQ ID NO: 2991 - RNA, 22 nt, Homo sapiens
cugggcagggcuccaggacaug

SEQ ID NO: 2992 - RNA, 72 nt, Homo sapiens
gugggcugggcagggcuccaggacaugugacugggccuuagaggccuguccugggcccccugccccacccac

SEQ ID NO: 2993 - RNA, 22 nt, Homo sapiens
cuuggugagcaggacaugggug

SEQ ID NO: 2994 - RNA, 109 nt, Homo sapiens
ccuggccccucccaucuuuuaaaaucaccugugaccauccucacugagcugaggcccucaacccuuagcuggcuuggugagcaggacaugggugaggaggauggucagg

SEQ ID NO: 2995 - RNA, 22 nt, Homo sapiens
gaaacacaagagcaaggugcug

SEQ ID NO: 2996 - RNA, 68 nt, Homo sapiens
agggaaacacaagagcaaggugcugagguaaaaaacaccugagguagcuuuuuucuguguguuuuucu

SEQ ID NO: 2997 - RNA, 22 nt, Homo sapiens
gaaacagcugggacaggaaaac

SEQ ID NO: 2998 - RNA, 74 nt, Homo sapiens
uguuuuuuuauuccacuguucauccuucaagcugauaaacagcaacaaugggaaacagcugggacaggaaaaca

SEQ ID NO: 2999 - RNA, 22 nt, Homo sapiens
gaaaguggugggggacacccca

SEQ ID NO: 3000 - RNA, 70 nt, Homo sapiens
auucuggauucccccuccucacuugccccugcgacagggcaggggaaaguggugggggacaccccaggau

SEQ ID NO: 3001 - RNA, 22 nt, Homo sapiens
gaagagagguuugggacagcaa

SEQ ID NO: 3002 - RNA, 94 nt, Homo sapiens
auggauuacuugguauugcuguccagaaaccugacucucauaccauuuuggggggaagagagguuugggacagcaauuaaugaagcauauccau

SEQ ID NO: 3003 - RNA, 22 nt, Homo sapiens
gaagaggcagagacaguuuggg

SEQ ID NO: 3004 - RNA, 124 nt, Homo sapiens
ugcauugugcucacauucccuuaaauguuguuuccaaaggugcucagccucuagcccagcuggaaucuccgggaagaggcagagacaguuuggggaaaaagacacaggggaggagcgggaggca

SEQ ID NO: 3005 - RNA, 15 nt, Homo sapiens
gaaggcugaggcaca

SEQ ID NO: 3006 - RNA, 66 nt, Homo sapiens
ugugaccucuggccucucccaauaaugaaguccaucuagcaguccuucagggaaggcugaggcaca

SEQ ID NO: 3007 - RNA, 22 nt, Homo sapiens
gaagggaagaauggggagaugg

SEQ ID NO: 3008 - RNA, 69 nt, Homo sapiens
gggaagggaagaauggggagauggaaagcauuuacuucuuauucugaaccucauuuuucucuccuuccc

SEQ ID NO: 3009 - RNA, 22 nt, Homo sapiens
gaagggaggaaggccucucuac

SEQ ID NO: 3010 - RNA, 59 nt, Homo sapiens
gaagggaggaaggccucucuacauauggaaaagcccaugcguggaguuccccuccuuuc

SEQ ID NO: 3011 - RNA, 22 nt, Homo sapiens
gaaggggugaguugggaggggu

SEQ ID NO: 3012 - RNA, 73 nt, Homo sapiens
auaggggaaggggugaguugggagggguuguaggggcucccuucuccccuuuccacuuccccugguucccuau

SEQ ID NO: 3013 - RNA, 22 nt, Homo sapiens
gaaggugggggcuggaugcuuu

SEQ ID NO: 3014 - RNA, 56 nt, Homo sapiens
gaaggugggggcuggaugcuuuguuaagcaggaaaugcaggccacccccagccuuc

SEQ ID NO: 3015 - RNA, 22 nt, Homo sapiens
gaagggggggcagugcaugugu

SEQ ID NO: 3016 - RNA, 108 nt, Homo sapiens
aauccccagagaugugugggggaagggggggcagugcaugugugugcacguguguguucaugcgugcacgugggugucuccuugcccgacgagagauuccuugggauu

SEQ ID NO: 3017 - RNA, 22 nt, Homo sapiens
gagaggaagaaggucuggccuu

SEQ ID NO: 3018 - RNA, 98 nt, Homo sapiens
ugagacccaguugcggggagaggaagaaggucuggccuuucuacucaguaaggcucuguuuagguuaacccuucuuuuccucuugcugcuggcucuca

SEQ ID NO: 3019 - RNA, 22 nt, Homo sapiens
gaggaggcagaaaugguagcug

SEQ ID NO: 3020 - RNA, 94 nt, Homo sapiens; identical to SEQ ID NO: 58

SEQ ID NO: 3021 - RNA, 22 nt, Homo sapiens
gagguggcuuugggaugugcca

SEQ ID NO: 3022 - RNA, 75 nt, Homo sapiens
ccugaaggggagguggcuuugggaugugccagugcgccucuuacucggcaucuccugccagcugucucccacagg

SEQ ID NO: 3023 - RNA, 22 nt, Homo sapiens
gaggaggggaaaugaaaggaua

SEQ ID NO: 3024 - RNA, 102 nt, Homo sapiens
ggaauaugagugaguguggagggaggaggggaaaugaaaggauauuauauauuuuuuuguaucugucauuucccugcuaucucccauaugacuucuuaaucc

SEQ ID NO: 3025 - RNA, 22 nt, Homo sapiens
gaggaugggacgcguggggacu

SEQ ID NO: 3026 - RNA, 72 nt, Homo sapiens
gggaggaugggacgcguggggacugaaggcggcaucugccugaauaaagcccucgcgcgcucugagccuccc

SEQ ID NO: 3027 - RNA, 22 nt, Homo sapiens
gagggaaagaugggaaggggac

SEQ ID NO: 3028 - RNA, 66 nt, Homo sapiens
gggagggaaagaugggaaggggacagcugugauuacugacccauccugccccagcuuucccucacu

SEQ ID NO: 3029 - RNA, 22 nt, Homo sapiens
gagggagcugggagaguuugga

SEQ ID NO: 3030 - RNA, 153 nt, Homo sapiens
ccagugggagggaaaagggguggggaaaccuggcccagagaccugggagggagcugggagaguuuggaguguguucucucucuccuuugcuuucucuugcucucucuuucugggucagcaugcuaggccaccgaccauccccucucccccugg

SEQ ID NO: 3031 - RNA, 22 nt, Homo sapiens
gagggagggggaacgguguucg

SEQ ID NO: 3032 - RNA, 56 nt, Homo sapiens
gagggagggggaacgguguucgcggcaucuggagucaucgaucuuccuuuuccuuc

SEQ ID NO: 3033 - RNA, 22 nt, Homo sapiens
gaggggccacuggaugguguua

SEQ ID NO: 3034 - RNA, 101 nt, Homo sapiens
ggucccugcacuguagaagcaugauccagugggcucuccugaauggacuugguccaaaaagcugaagggaggggccacuggaugguguuaugcagggaacc

SEQ ID NO: 3035 - RNA, 22 nt, Homo sapiens
gagguggcuggauuuuggccua

SEQ ID NO: 3036 - RNA, 70 nt, Homo sapiens
cugggaaggcccgaucgcaggcacucccuagucuggcuggagggagguggcuggauuuuggccuacccag

SEQ ID NO: 3037 - RNA, 22 nt, Homo sapiens
gauacacgaggggcaggagcaa

SEQ ID NO: 3038 - RNA, 69 nt, Homo sapiens
cagaaccuguucagaucccuuagguacccuggagucacuuggggauacacgaggggcaggagcaaaggg

SEQ ID NO: 3039 - RNA, 22 nt, Homo sapiens
gaucagugaaggaggaagcugg

SEQ ID NO: 3040 - RNA, 87 nt, Homo sapiens
cuggcuagacuagggaucagugaaggaggaagcuggcaaggcuggcgggccaggcugagcguuucuucuugauccuggcacagccgg

SEQ ID NO: 3041 - RNA, 22 nt, Homo sapiens
gcaggugcagggcugcuguauc

SEQ ID NO: 3042 - RNA, 74 nt, Homo sapiens
uccagacagaggaccuagcaugugcccaggcccagggugugaccgggggcaggugcagggcugcuguaucugga

SEQ ID NO: 3043 - RNA, 22 nt, Homo sapiens
gccugccugggaaggguauugc

SEQ ID NO: 3044 - RNA, 86 nt, Homo sapiens
ggggaggcgaagaauaagugccuugauuuugcagcuuuuucuuuccuaagggccugccugggaaggguauugcuucuuguuucccu

SEQ ID NO: 3045 - RNA, 20 nt, Homo sapiens
cgggaaguggagggaggaag

SEQ ID NO: 3046 - RNA, 56 nt, Homo sapiens
cuuuuccucuccacuuccuguucacacaggggggggcgggaaguggagggaggaag

SEQ ID NO: 3047 - RNA, 22 nt, Homo sapiens
gcgggagcagccuucagugucu

SEQ ID NO: 3048 - RNA, 56 nt, Homo sapiens
cagaggcgcaaggcgccccucccccaccucggggcgggagcagccuucagugucug

SEQ ID NO: 3049 - RNA, 22 nt, Homo sapiens
gcgugggucucauuucccacug

SEQ ID NO: 3050 - RNA, 89 nt, Homo sapiens
gggagccugcaagugucaggugaguccucaugcuggacucugcccucaagggcggggcgugggucucauuucccacuggccaggcucuc

SEQ ID NO: 3051 - RNA, 22 nt, Homo sapiens
gcuagggaggagcauggaccuu

SEQ ID NO: 3052 - RNA, 77 nt, Homo sapiens
gccucuuccuuucguaacuccugacccaagcucugcagggcaguguagggcuagggaggagcauggaccuuaguggc

SEQ ID NO: 3053 - RNA, 22 nt, Homo sapiens
gcuccaaagucggggcggguug

SEQ ID NO: 3054 - RNA, 73 nt, Homo sapiens
aaggagggcuccaaagucggggcggguugccugggucccagcugggcccugcucuggacuccuggcucuccuu

SEQ ID NO: 3055 - RNA, 22 nt, Homo sapiens
gcugggaguugggggauauuca

SEQ ID NO: 3056 - RNA, 77 nt, Homo sapiens
uccccaaggagucccuuuaacucacagccccuuuccuggccagggggcugggaguugggggauauucaucucgggga

SEQ ID NO: 3057 - RNA, 22 nt, Homo sapiens
ggaaggccagaggaggggaagg

SEQ ID NO: 3058 - RNA, 87 nt, Homo sapiens
auggggaaggccagaggaggggaagguuauaugagugaacacgagcauuguuccuaaaguuauuuccuuucuccugcccuuucccau

SEQ ID NO: 3059 - RNA, 18 nt, Homo sapiens
ggaauguguugggaugga

SEQ ID NO: 3060 - RNA, 63 nt, Homo sapiens
uucaucccccacaucccuuuucuaaacaagcuuaguguuacuuggggaauguguugggaugga

SEQ ID NO: 3061 - RNA, 20 nt, Homo sapiens
ggacgagcauaucugccagg

SEQ ID NO: 3062 - RNA, 58 nt, Homo sapiens
caugggagcugagcuugucccaggacucaagggaguggggacgagcauaucugccagg

SEQ ID NO: 3063 - RNA, 22 nt, Homo sapiens
ggagagugggauuagggaacag

SEQ ID NO: 3064 - RNA, 125 nt, Homo sapiens
gggguguaugaaggaagccugguuaguggggagagugggauuagggaacagcugcuuaaccuggcuuguuucaagucccccuuucucccuuuuugcccucaaaaaguuccccucauuuuuucccc

SEQ ID NO: 3065 - RNA, 20 nt, Homo sapiens
gugggaagguggaagaaggg

SEQ ID NO: 3066 - RNA, 62 nt, Homo sapiens
cccuuugaccguuuuccugcccaucagagccacagucagagggugggaagguggaagaaggg

SEQ ID NO: 3067 - RNA, 22 nt, Homo sapiens
guguggggagguuaagggacuu

SEQ ID NO: 3068 - RNA, 80 nt, Homo sapiens
ccuugggguaggugcucuuauucgccacauuuuacaaaugaggaaacuggguguggggagguuaagggacuuacccaggg

SEQ ID NO: 3069 - RNA, 22 nt, Homo sapiens
ggagcuggggcagcugugggaa

SEQ ID NO: 3070 - RNA, 70 nt, Homo sapiens
uggcucaguuccaccaguacccagaccugggggccagccggggagcuggggcagcugugggaaugagcua

SEQ ID NO: 3071 - RNA, 22 nt, Homo sapiens
ggaggggcagccucagggaucu

SEQ ID NO: 3072 - RNA, 73 nt, Homo sapiens
ugggggaggggcagccucagggaucuugaggggcauauccuaaggagcaggaugccugggucuccucccucca

SEQ ID NO: 3073 - RNA, 22 nt, Homo sapiens
guaguugguggggggagguagu

SEQ ID NO: 3074 - RNA, 67 nt, Homo sapiens
guacguaucucccuccccacugcgcuguuuugucaauccugcguaguugguggggggagguaguuac

SEQ ID NO: 3075 - RNA, 22 nt, Homo sapiens
ggcagcagggaugggugggagc

SEQ ID NO: 3076 - RNA, 128 nt, Homo sapiens
ggugggcaggcacuaugggggaagaggaaggggcagcagggaugggugggagcucaggcaagcuggcaaagcauccucccagcucugcucccaguuauuccucuucccucucacugugcuggcccgcu

SEQ ID NO: 3077 - RNA, 22 nt, Homo sapiens
ggcuagggugcagguggggagu

SEQ ID NO: 3078 - RNA, 76 nt, Homo sapiens
ccgugacuccacugccugccuccgcuggacuguuccaggagaggggaggggcuagggugcagguggggaguugggg

SEQ ID NO: 3079 - RNA, 22 nt, Homo sapiens
ggcuggggaagccagaaaccaa

SEQ ID NO: 3080 - RNA, 79 nt, Homo sapiens; identical to SEQ ID NO: 1100

SEQ ID NO: 3081 - RNA, 22 nt, Homo sapiens
ggcuggggcugaggucugucca

SEQ ID NO: 3082 - RNA, 77 nt, Homo sapiens
cagggugggggcuggggcugaggucuguccaaggggcuguguccagcuugcugggcaaccuggccaagucuccccug

SEQ ID NO: 3083 - RNA, 22 nt, Homo sapiens
augugugggggaagggaagucu

SEQ ID NO: 3084 - RNA, 96 nt, Homo sapiens; identical to SEQ ID NO: 2732

SEQ ID NO: 3085 - RNA, 22 nt, Homo sapiens
gggaggaagugugagcagagaa

SEQ ID NO: 3086 - RNA, 108 nt, Homo sapiens
caugcaguaauagcuugguuuuucccguguucagcuccuccccgaguacuuaguguuaaaucacagggggaggaagugugagcagagaaaaaacagcacuauuacaug

SEQ ID NO: 3087 - RNA, 22 nt, Homo sapiens
gggagggagggacuuuugugga

SEQ ID NO: 3088 - RNA, 84 nt, Homo sapiens
guguuuugguagggggagggagggacuuuuguggaugaugcagaagaaucagcaacguccuuccccacccccuugcagaaugac

SEQ ID NO: 3089 - RNA, 22 nt, Homo sapiens
gggauggggaagagaggaagag

SEQ ID NO: 3090 - RNA, 68 nt, Homo sapiens
cuauauuccauuaucuuccucugcccuugaacaguugauaauaugggggauggggaagagaggaagag

SEQ ID NO: 3091 - RNA, 22 nt, Homo sapiens
gggauggucuaggggauccugu

SEQ ID NO: 3092 - RNA, 94 nt, Homo sapiens
ggguguauuaggugggggauggucuaggggauccugugugcuguucuuuuugcuaggauccccuaagacccuuccuucacugucuuuuucauuc

SEQ ID NO: 3093 - RNA, 22 nt, Homo sapiens
gggcacagcagugagcagaaaa

SEQ ID NO: 3094 - RNA, 111 nt, Homo sapiens
gcaggcagggcacaguccauauucacacaagcucugugagcugcuggacccccugccccguuacagggacugggggcacagcagugagcagaaaagaccggguccugccgc

SEQ ID NO: 3095 - RNA, 22 nt, Homo sapiens
auguuucccgggcaaccucuuu

SEQ ID NO: 3096 - RNA, 93 nt, Homo sapiens
aagcuccaauaccuggaaagagguuguaccuaaaguguucucuguauuggcggaaaauguuucccgggcaaccucuuuucauugugaaggcuu

SEQ ID NO: 3097 - RNA, 22 nt, Homo sapiens
auuagcauuuaaugacaugcau

SEQ ID NO: 3098 - RNA, 125 nt, Homo sapiens
uuagacaccaguucugcucauucugaagucauaauucaugucauugaaugaaaaucucauuuaaugucaugaaauuagcauuuaaugacaugcauuaugacuacagaaugaguagaauuguuuaa

SEQ ID NO: 3099 - RNA, 22 nt, Homo sapiens
gggugggggacuggugaaggag

SEQ ID NO: 3100 - RNA, 77 nt, Homo sapiens
gugaagggggugggggacuggugaaggagaauucgagaggaacuucugcucucacugguuacucaucuacucaucgc

SEQ ID NO: 3101 - RNA, 22 nt, Homo sapiens
gguagaagugagguggagcaug

SEQ ID NO: 3102 - RNA, 83 nt, Homo sapiens
gggcugggguagaagugagguggagcauggagaggaugucgaagccuccgugcccauccacuccucuuucucagaaccagccc

SEQ ID NO: 3103 - RNA, 22 nt, Homo sapiens
gugguuguggaggugacagaac

SEQ ID NO: 3104 - RNA, 86 nt, Homo sapiens
gcacagcucuguuacuacgcaccacccuuuagaccgcagucuucuuucagcucuuugggugguuguggaggugacagaacuagugc

SEQ ID NO: 3105 - RNA, 22 nt, Homo sapiens
uaaccuuuggaagucccugacu

SEQ ID NO: 3106 - RNA, 67 nt, Homo sapiens
auacugaagugggggcucugaagggccauuugguggaugguaaccuuuggaagucccugacuaguau

SEQ ID NO: 3107 - RNA, 22 nt, Homo sapiens
gggagggauagacaugauuugg

SEQ ID NO: 3108 - RNA, 75 nt, Homo sapiens
ggaagugggagggauagacaugauuuggaagcucuuguuggcuuuauuuuuugucuguaaauccuucuguucucc

SEQ ID NO: 3109 - RNA, 22 nt, Homo sapiens
ugucucagagguccugggggug

SEQ ID NO: 3110 - RNA, 84 nt, Homo sapiens
cuuguuuugcagcccgggaaacugaggcacagagcuacagagguucucaccuggugucucagagguccuggggguggaagcagg

SEQ ID NO: 3111 - RNA, 22 nt, Homo sapiens
guugagggugggagugggaaac

SEQ ID NO: 3112 - RNA, 84 nt, Homo sapiens
gucauuugcuuuuccucucucccaccugaagcccugaguaagcucagaggguugagggugggagugggaaaccaggcaggugac

SEQ ID NO: 3113 - RNA, 22 nt, Homo sapiens
guuuggugucaccaucaacccu

SEQ ID NO: 3114 - RNA, 72 nt, Homo sapiens
ucuugagagcugaugguggugcugaccauccuucuggggaaggggguuuggugucaccaucaacccuuaagg

SEQ ID NO: 3115 - RNA, 22 nt, Homo sapiens
ccacugaccguugacuguaccu

SEQ ID NO: 3116 - RNA, 110 nt, Homo sapiens; identical to SEQ ID NO: 830

SEQ ID NO: 3117 - RNA, 20 nt, Homo sapiens
uaaggggaagguggggaaag

SEQ ID NO: 3118 - RNA, 56 nt, Homo sapiens
cuuuuacugccuuuguuuuaccauucuugucuuagguaaggggaagguggggaaag

SEQ ID NO: 3119 - RNA, 22 nt, Homo sapiens
uaaugggguggggaacagucaa

SEQ ID NO: 3120 - RNA, 80 nt, Homo sapiens
agagguuggugguaaugggguggggaacagucaaagggaucccacuggaggcugcuccucaacccaccuucccagccucu

SEQ ID NO: 3121 - RNA, 22 nt, Homo sapiens
ccugcuaugccaacauauugcc

SEQ ID NO: 3122 - RNA, 71 nt, Homo sapiens
ggagaggaggcaagaugcuggcauagcuguugaacugggaaccugcuaugccaacauauugccaucuuucc

SEQ ID NO: 3123 - RNA, 22 nt, Homo sapiens
uacagggcaggguggggugaaa

SEQ ID NO: 3124 - RNA, 80 nt, Homo sapiens
uacagggcaggguggggugaaaacaguuuuagggacgcccccuucccauccuuuccucuucaccccccgcccacccugug

SEQ ID NO: 3125 - RNA, 22 nt, Homo sapiens
ccuggcauacaauguagauuuc

SEQ ID NO: 3126 - RNA, 110 nt, Homo sapiens
ugaacauccaggucuggggcaugaaccuggcauacaauguagauuucuguguucguuaggcaacagcuacauugucugcuggguuucaggcuaccuggaaacauguucuc

SEQ ID NO: 3127 - RNA, 22 nt, Homo sapiens
uacaugugcacaacgugcaggu

SEQ ID NO: 3128 - RNA, 82 nt, Homo sapiens; identical to SEQ ID NO: 122

SEQ ID NO: 3129 - RNA, 22 nt, Homo sapiens
uacucugugggagggaggagau

SEQ ID NO: 3130 - RNA, 74 nt, Homo sapiens
cagaagguacucugugggagggaggagauaauagccaaugauuauauuccuccuucauacuugcaguaccucug

SEQ ID NO: 3131 - RNA, 22 nt, Homo sapiens
uagagguggagcgaaguggggc

SEQ ID NO: 3132 - RNA, 81 nt, Homo sapiens
ccagguagagguggagcgaaguggggcucuggaagcugucuacuuaaaccccuuucccacuuccugcuccucccucccugg

SEQ ID NO: 3133 - RNA, 17 nt, Homo sapiens
uagcugguggcugagca

SEQ ID NO: 3134 - RNA, 61 nt, Homo sapiens
ugcuuucaccaaggugccucuguguuuacuuaagugacuugugguagcugguggcugagca

SEQ ID NO: 3135 - RNA, 22 nt, Homo sapiens
uaggaaggcggguaagggcugg

SEQ ID NO: 3136 - RNA, 112 nt, Homo sapiens
uccgggccaaauccccuaaggugguaggaaggcggguaagggcuggaccuucgggaggguguugccagcccaguggcuccgccuucacaccccuuacuucucccggcccggg

SEQ ID NO: 3137 - RNA, 22 nt, Homo sapiens
uaggcaguguauugcuagcggc

SEQ ID NO: 3138 - RNA, 92 nt, Homo sapiens
gcugggaugugucagguaggcaguguauugcuagcggcuguuaaugauuuuaacaguugcuaguugcacuccucucuguugcauucagaagc

SEQ ID NO: 3139 - RNA, 22 nt, Homo sapiens
uagggaaagggaauaggcacug

SEQ ID NO: 3140 - RNA, 59 nt, Homo sapiens
uagggaaagggaauaggcacugaaacacauaaaucaguguuuugaauucuuuuucucug

SEQ ID NO: 3141 - RNA, 22 nt, Homo sapiens
uagggguggggcaaaggggcau

SEQ ID NO: 3142 - RNA, 69 nt, Homo sapiens
ggguagggguggggcaaaggggcaugcuucuguuuaaaucaagucuccucuguccucaccccuuugcuc

SEQ ID NO: 3143 - RNA, 22 nt, Homo sapiens
uauaugcaugugugagugcgcu

SEQ ID NO: 3144 - RNA, 75 nt, Homo sapiens
gucccugcgugcgcacacgggccugcauuuguacccugcguggcuggguauaugcaugugugagugcgcuggggc

SEQ ID NO: 3145 - RNA, 22 nt, Homo sapiens
uaugggggaugucaggcaggcc

SEQ ID NO: 3146 - RNA, 117 nt, Homo sapiens
gggaagcgacagagcugcagguaggacuaagguaugggggaugucaggcaggcccuuguucugcguggccauccugacucauguccccugcauuuuagccagcuuugucugcugccc

SEQ ID NO: 3147 - RNA, 22 nt, Homo sapiens
ugacggguauucuuggguggau

SEQ ID NO: 3148 - RNA, 102 nt, Homo sapiens
gguccucugacucucuucggugacggguauucuuggguggauaauacggauuacguuguuauugcuuaagaauacgcguagucgaggagaguaccagcggca

SEQ ID NO: 3149 - RNA, 22 nt, Homo sapiens
ucagaagucgaaggagggccau

SEQ ID NO: 3150 - RNA, 70 nt, Homo sapiens
guauggucagaagucgaaggagggccauuuaaucagagaauguggaacugcuuggacuuuugagcucagc

SEQ ID NO: 3151 - RNA, 22 nt, Homo sapiens
ucagagauuucaaagggaggca

SEQ ID NO: 3152 - RNA, 67 nt, Homo sapiens
gggucagagauuucaaagggaggcaggagucccuguccuaugucucuucuuuggaccuuucugauuc

SEQ ID NO: 3153 - RNA, 22 nt, Homo sapiens
ucagauuagagaggggaauggg

SEQ ID NO: 3154 - RNA, 67 nt, Homo sapiens
gucagauuagagaggggaaugggaaauuuguugauuuuuuugucuauucuccucuguauuguuugac

SEQ ID NO: 3155 - RNA, 22 nt, Homo sapiens
gggcccggggccuugcacaacu

SEQ ID NO: 3156 - RNA, 71 nt, Homo sapiens
cacccgcgggcccggggccuugcacaacucuuuaaauaaccauguuuugcaaggcccgcgccgagcgggug

SEQ ID NO: 3157 - RNA, 22 nt, Homo sapiens
ucccaggaggugguggaggcca

SEQ ID NO: 3158 - RNA, 78 nt, Homo sapiens
agccagcagggggcgcugcugcccaugggauccucauggccaagggucccaggaggugguggaggccaucugagggcu

SEQ ID NO: 3159 - RNA, 22 nt, Homo sapiens
ucccccccauccccuuucuacc

SEQ ID NO: 3160 - RNA, 72 nt, Homo sapiens
gguugggagagcgggguugggggcggaccccagggccgcaccccuggucccccccauccccuuucuaccgcc

SEQ ID NO: 3161 - RNA, 22 nt, Homo sapiens
uccuacugcuuggaucaggggg

SEQ ID NO: 3162 - RNA, 86 nt, Homo sapiens
gccucuaauggagucucuuugaguagagcagggguaccugguaacaacuggguccuacugcuuggaucagggggcugcauggaggc

SEQ ID NO: 3163 - RNA, 22 nt, Homo sapiens
uccucauagaauugauagcuuu

SEQ ID NO: 3164 - RNA, 75 nt, Homo sapiens
auuagugguccucauagaauugauagcuuuuugaaccgugacaaugagauuaucgauuccugaaagggcccuaau

SEQ ID NO: 3165 - RNA, 22 nt, Homo sapiens
ucuaguucuuagacuucuuguc

SEQ ID NO: 3166 - RNA, 111 nt, Homo sapiens
ucuaaaccacaucagugaguuagugaaaggguugagaauagacuucacaguuugugacaucuggucuaguucuuagacuucuugucuacugucucacuguguguucuugga

SEQ ID NO: 3167 - RNA, 22 nt, Homo sapiens
agagauuaggcugggggcuuua

SEQ ID NO: 3168 - RNA, 69 nt, Homo sapiens
ggcagagauuaggcugggggcuuuaggaagcuaccugcuucuccuuccugaaucccugccuauuuugcc

SEQ ID NO: 3169 - RNA, 22 nt, Homo sapiens
ucuggggauggggcuggugagg

SEQ ID NO: 3170 - RNA, 66 nt, Homo sapiens
uaucccccagugcccaccucagugcccgguguagcgaaggucuggggauggggcuggugagggaug

SEQ ID NO: 3171 - RNA, 22 nt, Homo sapiens
ugaagaaggaauuggggcacag

SEQ ID NO: 3172 - RNA, 75 nt, Homo sapiens
gauauucucugugugcuaacucagucuuuacuagauccccagagggugaagaaggaauuggggcacagagaaauc

SEQ ID NO: 3173 - RNA, 22 nt, Homo sapiens
ugaagagaggggccuuugugau

SEQ ID NO: 3174 - RNA, 95 nt, Homo sapiens
acaguggaggauguggugaagagaggggccuuugugauuaccauaucagugagaguuguaaucaccccuuuuuuuauucuaucuuguuucucugu

SEQ ID NO: 3175 - RNA, 22 nt, Homo sapiens
ugaauggcaggaggguugcgca

SEQ ID NO: 3176 - RNA, 75 nt, Homo sapiens
gacacuggugaauggcaggaggguugcgcaugaagccacaaagcuacuuggguuucuccuucucauuugccuuuu

SEQ ID NO: 3177 - RNA, 22 nt, Homo sapiens
ugaauuugauagucuuggcugu

SEQ ID NO: 3178 - RNA, 90 nt, Homo sapiens
gccaaggugaauuugauagucuuggcuguacagcguagugguuaaaagcaugccauuuggagccagacuguuuagguucaaaccuuaggu

SEQ ID NO: 3179 - RNA, 22 nt, Homo sapiens
ugacaugcugggguggggagaa

SEQ ID NO: 3180 - RNA, 70 nt, Homo sapiens
gauggugacaugcugggguggggagaaaccacugcuaugccuucuuccugaccgaccaguuguuuucauu

SEQ ID NO: 3181 - RNA, 22 nt, Homo sapiens
agagucaauuuucuguuacaua

SEQ ID NO: 3182 - RNA, 121 nt, Homo sapiens
gucagaugguacaauuauaguuauuuugcagagucaauuuucuguuacauaaucacauagacuuguaucuaaugcaacagaaaauugccuggguggaauaacuuucagguguugguuugac

SEQ ID NO: 3183 - RNA, 22 nt, Homo sapiens
ugcagugcugggggagguugug

SEQ ID NO: 3184 - RNA, 74 nt, Homo sapiens
caggugcagugcugggggagguugugggugaagagacuaaagccugccucccaucccaccccagcacugccuug

SEQ ID NO: 3185 - RNA, 22 nt, Homo sapiens
ugcagggauggaaauaagcggg

SEQ ID NO: 3186 - RNA, 84 nt, Homo sapiens
gaagcaggccucaccugauuuccacccaccuguaucacuuuuaguaaauggugcagggauggaaauaagcgggggaaccagcuc

SEQ ID NO: 3187 - RNA, 22 nt, Homo sapiens
uggaagggagaaaacuuguggc

SEQ ID NO: 3188 - RNA, 71 nt, Homo sapiens
auggguggaagggagaaaacuuguggcuuauuguaaaaguggccauguguuauuuucuucucucuauccau

SEQ ID NO: 3189 - RNA, 22 nt, Homo sapiens
uggagaggggagugggggagua

SEQ ID NO: 3190 - RNA, 84 nt, Homo sapiens
ggggauauugguggagaggggagugggggaguagaagcccgauuuucucugccuuccucuucacucccuccuacugaggacccc

SEQ ID NO: 3191 - RNA, 22 nt, Homo sapiens
uggagggaagagggucucagac

SEQ ID NO: 3192 - RNA, 79 nt, Homo sapiens
gaugguugguggagggaagagggucucagaccaccauggcucaugcugacauccuuuaagaucuccuuuaucaacucuc

SEQ ID NO: 3193 - RNA, 22 nt, Homo sapiens
ugggaggcagcaagaggcagcu

SEQ ID NO: 3194 - RNA, 88 nt, Homo sapiens
gcagaggaaggugggaggcagcaagaggcagcuggagccguggugggccgucugucauccuguucaccucccacucuucccacucugc

SEQ ID NO: 3195 - RNA, 22 nt, Homo sapiens
uggagugggggaaggaguguua

SEQ ID NO: 3196 - RNA, 119 nt, Homo sapiens
ugucuauuacagcacuuagcauaggguggagugggggaaggaguguuauuuagcagaguggaccaagcacagcuugcauuccaguccccacuguguccuaagcugugugauuuuggaca

SEQ ID NO: 3197 - RNA, 22 nt, Homo sapiens
uggcagguuccgagaugaggag

SEQ ID NO: 3198 - RNA, 66 nt, Homo sapiens
gguggcagguuccgagaugaggaggaaccgcacugagaagccuccucugcauccgaacccgccacc

SEQ ID NO: 3199 - RNA, 22 nt, Homo sapiens
uggccagagggguccucagaca

SEQ ID NO: 3200 - RNA, 77 nt, Homo sapiens
ugggggugguggccagagggguccucagacaacucaacaagggaaguauugugggcccaccucugccuccacccuca

SEQ ID NO: 3201 - RNA, 22 nt, Homo sapiens
uggcugaugacagaacaaugug

SEQ ID NO: 3202 - RNA, 89 nt, Homo sapiens
ggucgcgguggcugaugacagaacaauguggagaaaagugugaugugucaaauccuuacuuuguucugggcauugugcuaaauguggcc

SEQ ID NO: 3203 - RNA, 22 nt, Homo sapiens
ggggagguucuagagggacagg

SEQ ID NO: 3204 - RNA, 70 nt, Homo sapiens
ggggagguucuagagggacagggcaagugagaagaugcaaugcaggucaguccuguuccugaaccuuccc

SEQ ID NO: 3205 - RNA, 22 nt, Homo sapiens
uggcuggguccugaaagcaugc

SEQ ID NO: 3206 - RNA, 132 nt, Homo sapiens; identical to SEQ ID NO: 1390

SEQ ID NO: 3207 - RNA, 22 nt, Homo sapiens
ugggaaaugaggggugaggcuu

SEQ ID NO: 3208 - RNA, 71 nt, Homo sapiens
ugggugggaaaugaggggugaggcuuguuuuauaggauuccuaucuucaggcuccccucagauuccacuca

SEQ ID NO: 3209 - RNA, 22 nt, Homo sapiens
ugggacaggggugggggcacag

SEQ ID NO: 3210 - RNA, 85 nt, Homo sapiens
gucaggaaucccaggugggacaggggugggggcacaguagccucuggcacuguagcaccccagcuucucccuccuagccucugac

SEQ ID NO: 3211 - RNA, 22 nt, Homo sapiens
ugggagaauaagguaguguggu

SEQ ID NO: 3212 - RNA, 80 nt, Homo sapiens
ggggugggagaauaagguagugugguucccuagaagagacacauuugucuucaccacugaagccucaguuuucucauuuc

SEQ ID NO: 3213 - RNA, 22 nt, Homo sapiens
ugggacugggggguugggggac

SEQ ID NO: 3214 - RNA, 112 nt, Homo sapiens
ggagcgagcacuccagggcagagguggugggacugggggguugggggacuagagagcugugccuuucccucucucccccgcccucagucccugcccugcccagugugugccc

SEQ ID NO: 3215 - RNA, 22 nt, Homo sapiens
ugguggcugcucaagggaggag

SEQ ID NO: 3216 - RNA, 67 nt, Homo sapiens
gggugguggcugcucaagggaggaggcugcaauuuaaggcacccucugccuugagcagugcccaccc

SEQ ID NO: 3217 - RNA, 22 nt, Homo sapiens
ugguggcuuuggcgcugguggc

SEQ ID NO: 3218 - RNA, 68 nt, Homo sapiens
ggcggugguggcuuuggcgcugguggcaggggaagccuuaacggccccggagcugaagccucucuguu

SEQ ID NO: 3219 - RNA, 22 nt, Homo sapiens
ugggcaugugggcagggugcug

SEQ ID NO: 3220 - RNA, 123 nt, Homo sapiens
gcuggccuucaggagggccuuggcugggugggcaugugggcagggugcugacaggacaacagccuuccuguccagccugcccacacccacuccucuuugcccucagggcucugccgagccagc

SEQ ID NO: 3221 - RNA, 22 nt, Homo sapiens
ugguggcagagcugggauuuga

SEQ ID NO: 3222 - RNA, 142 nt, Homo sapiens
gggaggacacagaggcacaggggcaugaggacccugcccugggugguggcagagcugggauuugaacccggguuugcaugacucccagcccuguuccuguccucucaggggcugcacccucccccugccccuuccuccuccc

SEQ ID NO: 3223 - RNA, 22 nt, Homo sapiens
uggugggagagaagagaggaau

SEQ ID NO: 3224 - RNA, 91 nt, Homo sapiens
ggggaggauggguggugggagagaagagaggaauugucaaaagugcagugauuuagugucugucucuuucuucccuucucccucccucccu

SEQ ID NO: 3225 - RNA, 22 nt, Homo sapiens
uggugguuuacaaaguaauuca

SEQ ID NO: 3226 - RNA, 96 nt, Homo sapiens
cacaaacugugaagugcuguggauuucuuugugaaucaccauaucuaagcuaaugugguggugguuuacaaaguaauucauagugcuucacaggug

SEQ ID NO: 3227 - RNA, 22 nt, Homo sapiens
uggugugggcaaggaaaagaaa

SEQ ID NO: 3228 - RNA, 89 nt, Homo sapiens
cuggcagaggucugugguggugugggcaaggaaaagaaaauucuauucaucuucuuuuccuguccaggcaauuauugaccuucuuucag

SEQ ID NO: 3229 - RNA, 22 nt, Homo sapiens
ugucaaucauauugcuuuaugu

SEQ ID NO: 3230 - RNA, 112 nt, Homo sapiens
ugcacuguugugacaagcccuaguagauggugucaaucauauugcuuuauguuacauuaagugacauauuguaaugcgauugauacaacaugggaugacacaucauaaugcg

SEQ ID NO: 3231 - RNA, 22 nt, Homo sapiens
ugucucauuucagggcagaggg

SEQ ID NO: 3232 - RNA, 73 nt, Homo sapiens
guauuucauucuggaaacugaaaugggacauuaaauaaagaauggugucucauuucagggcagagggacuuac

SEQ ID NO: 3233 - RNA, 22 nt, Homo sapiens
ugugaagggcgggagacuggga

SEQ ID NO: 3234 - RNA, 87 nt, Homo sapiens
cccucccgcuucaccggcuaccccgcccccacacucuuuucccacccaaggugugaagggcgggagacugggaggagaaagggaggg

SEQ ID NO: 3235 - RNA, 22 nt, Homo sapiens
gggugggugguccgcagacaua

SEQ ID NO: 3236 - RNA, 67 nt, Homo sapiens
ggcgggugggugguccgcagacauauggcacgaauucagcacauguucugagguccaccgacuuucc

SEQ ID NO: 3237 - RNA, 22 nt, Homo sapiens
uuaauagaaaaggaggcugugg

SEQ ID NO: 3238 - RNA, 91 nt, Homo sapiens
ucaagagguaauuuaucuuggucacccuuccuucuacagagcacuccagccuggagguuaauagaaaaggaggcuguggcugccaucuuga

SEQ ID NO: 3239 - RNA, 22 nt, Homo sapiens
uuagggucgaagccccacuccc

SEQ ID NO: 3240 - RNA, 85 nt, Homo sapiens
gcccaccuggguuagggucgaagccccacuccccacagaagguuuuccuaaaggagauggagccagggcccuaacccaguuaggu

SEQ ID NO: 3241 - RNA, 22 nt, Homo sapiens
agcauuuauuugaggcaggaag

SEQ ID NO: 3242 - RNA, 96 nt, Homo sapiens
uucuauugauuuuagggcagcauuuauuugaggcaggaaguuggaccagaugaccuauucaugccucucugucaauguuguucuauuuacaaagag

SEQ ID NO: 3243 - RNA, 22 nt, Homo sapiens
uucaugcgaugguuggagggau

SEQ ID NO: 3244 - RNA, 76 nt, Homo sapiens
gguucaugcgaugguuggagggaugguaaaagcaguuagcucuugucagcugcuucccucugcuagugcuugagcu

SEQ ID NO: 3245 - RNA, 22 nt, Homo sapiens
uucuaaggaauaagaagggggu

SEQ ID NO: 3246 - RNA, 93 nt, Homo sapiens
uccagcuugacuuucuaggguucuaaggaauaagaagggggucauguagauccugguuccuugauuucuccuuagagcuuggaaagcacugga

SEQ ID NO: 3247 - RNA, 22 nt, Homo sapiens
uucuccuggagggcgacuuuuu

SEQ ID NO: 3248 - RNA, 66 nt, Homo sapiens
aggguucuccuggagggcgacuuuuuugggaaucggacccaaggaggaugccuucccugaagcccu

SEQ ID NO: 3249 - RNA, 22 nt, Homo sapiens
uucuccuggaggguaguuuuuu

SEQ ID NO: 3250 - RNA, 66 nt, Homo sapiens
aggguucuccuggaggguaguuuuuuugggaaucuagcccaaggaggaugccuucccugaagcccu

SEQ ID NO: 3251 - RNA, 22 nt, Homo sapiens
uucuggagggugggucagugca

SEQ ID NO: 3252 - RNA, 84 nt, Homo sapiens
gagcugguucuggagggugggucagugcacccgaggcucagagcauccauccaccccacuggcccuccuuccagauacccucuc

SEQ ID NO: 3253 - RNA, 22 nt, Homo sapiens
uuguagugcuuauugccauuag

SEQ ID NO: 3254 - RNA, 68 nt, Homo sapiens
cuaauggccuaauaaugcauuagacuugaaucagaaauacuuuggguuguagugcuuauugccauuag

SEQ ID NO: 3255 - RNA, 22 nt, Homo sapiens
ggggggugcuuccucauuagga

SEQ ID NO: 3256 - RNA, 95 nt, Homo sapiens
gcuccuucuguuguccuaaggaugaaggcgcucccuguccuuugcagaggcucccuuagcggggggugcuuccucauuaggaugcaaaugggggu

SEQ ID NO: 3257 - RNA, 22 nt, Homo sapiens
ggggugaaaauaaagacugacu

SEQ ID NO: 3258 - RNA, 108 nt, Homo sapiens
guacagggcaaauagcagugcggggugaaaauaaagacugacuaccacuggcaacccuuggucacucuucauuuauucauccaacauugcugaauauuugcccugugc

SEQ ID NO: 3259 - RNA, 22 nt, Homo sapiens
uuugugggggaucucugccugc

SEQ ID NO: 3260 - RNA, 82 nt, Homo sapiens
ggggcagaugaggagaggcagaauuguuacuuuuaggcuccacaugugugaggguuugugggggaucucugccugcugcccc

SEQ ID NO: 3261 - RNA, 22 nt, Homo sapiens
caggagagcggggauguaggca

SEQ ID NO: 3262 - RNA, 87 nt, Homo sapiens
ugcaacugugcucugucuguauccccacuggggcccagaagucugggucaggagagcggggauguaggcaaggcgguggcaggugca

SEQ ID NO: 3263 - RNA, 21 nt, Homo sapiens
gaguugggggacgaugggaga

SEQ ID NO: 3264 - RNA, 57 nt, Homo sapiens
uuucucaucacaacccuaggguaccagguacguggugaguugggggacgaugggaga

SEQ ID NO: 3265 - RNA, 22 nt, Homo sapiens
uuuugcagagguuaaggcugag

SEQ ID NO: 3266 - RNA, 109 nt, Homo sapiens
gcguuuccugaaucguggccuggugaaacagcuuagcuucugcagagcucgagagaaagaacggauuugguuuugcagagguuaaggcugaggcggcagcaggagaugu

SEQ ID NO: 3267 - RNA, 22 nt, Homo sapiens
aguaaucucaauugugaaauag

SEQ ID NO: 3268 - RNA, 84 nt, Homo sapiens
uagcugaaggcauuauuccacagcucagaauuuuuuuucaucuggaaaguaguaaucucaauugugaaauagugccuucagcug

SEQ ID NO: 3269 - RNA, 22 nt, Homo sapiens
acaggggagcugauggccagcc

SEQ ID NO: 3270 - RNA, 97 nt, Homo sapiens
gcacacugguagcugaguacaggggagcugauggccagccuggagcuguggggcagcugaggagcuggccagccuccugggauacagggccaguggc

SEQ ID NO: 3271 - RNA, 22 nt, Homo sapiens
gaaaucaagguugaauugugcu

SEQ ID NO: 3272 - RNA, 57 nt, Homo sapiens
agcauuuucugccugggugcuacaguaauaucugugaaaucaagguugaauugugcu

SEQ ID NO: 3273 - RNA, 22 nt, Homo sapiens
gaaggguggccuccugaagugg

SEQ ID NO: 3274 - RNA, 75 nt, Homo sapiens
gccuguaucccgcugggggucauccuaucucugaggucaagugucgugaaggguggccuccugaagugggaaggc

SEQ ID NO: 3275 - RNA, 22 nt, Homo sapiens
uugggaacauuuugcauguaua

SEQ ID NO: 3276 - RNA, 91 nt, Homo sapiens; identical to SEQ ID NO: 1084

SEQ ID NO: 3277 - RNA, 22 nt, Homo sapiens
uuggggacauuuugcauucaua

SEQ ID NO: 3278 - RNA, 100 nt, Homo sapiens
ccaaagaaagaugcuaaacuauuuuugcgauguguuccuaauauguaauauaaauguauuggggacauuuugcauucauaguuuuguaucaauaauaugg

SEQ ID NO: 3279 - RNA, 22 nt, Homo sapiens
uaguuuugcagguuugcaucca

SEQ ID NO: 3280 - RNA, 87 nt, Homo sapiens
cacuguucuaugguuaguuuugcagguuugcauccagcugugugauauucugcugugcaaauccaugcaaaacugacugugguagug

SEQ ID NO: 3281 - RNA, 22 nt, Homo sapiens
ucaaaacgugaggcgcugcuau

SEQ ID NO: 3282 - RNA, 98 nt, Homo sapiens
cgaggggauacagcagcaauucauguuuugaaguguucuaaaugguucaaaacgugaggcgcugcuauacccccucguggggaagguagaaggugggg

SEQ ID NO: 3283 - RNA, 22 nt, Homo sapiens
gccacacaaauguaaggcauua

SEQ ID NO: 3284 - RNA, 87 nt, Homo sapiens
uaaacucugaagugccacacaaauguaaggcauuauuauuuaaaauuaugauguaugcuugccauuuaaaauggugcuuuuuguuua

SEQ ID NO: 3285 - RNA, 22 nt, Homo sapiens
gcuccaguaacccuuugguguc

SEQ ID NO: 3286 - RNA, 55 nt, Homo sapiens
gcuccaguaacccuuuggugucuuggaaguccagccaguggaggguuauugaagu

SEQ ID NO: 3287 - RNA, 22 nt, Homo sapiens
ggaaaaaugucaggaugggaaa

SEQ ID NO: 3288 - RNA, 78 nt, Homo sapiens
uuaugauguggaaaaaugucaggaugggaaaaugaugaucuccauuuuuuuuccagccaugacauuucaguauuauga

SEQ ID NO: 3289 - RNA, 22 nt, Homo sapiens
ggggaguggggcuucgacccua

SEQ ID NO: 3290 - RNA, 92 nt, Homo sapiens; identical to SEQ ID NO: 72

SEQ ID NO: 3291 - RNA, 22 nt, Homo sapiens
gugccucuugucauccuuccuu

SEQ ID NO: 3292 - RNA, 73 nt, Homo sapiens; identical to SEQ ID NO: 1676

SEQ ID NO: 3293 - RNA, 22 nt, Homo sapiens
uaaaaaggcuaaauaauguuac

SEQ ID NO: 3294 - RNA, 79 nt, Homo sapiens
cugaguugggcacauuguuuggccucucuggcaaguuccauuuucuguuaaaaaggcuaaauaauguuacccaauccag

SEQ ID NO: 3295 - RNA, 22 nt, Homo sapiens
uaaaguccggaguggguguggc

SEQ ID NO: 3296 - RNA, 81 nt, Homo sapiens
uuaaaguccggaguggguguggcuauacgacacacaaccagaaugauuagauugacuuucuggcacaccuacucacuuuga

SEQ ID NO: 3297 - RNA, 22 nt, Homo sapiens
uaauuuccucuggcagagggag

SEQ ID NO: 3298 - RNA, 72 nt, Homo sapiens; identical to SEQ ID NO: 722

SEQ ID NO: 3299 - RNA, 22 nt, Homo sapiens
uaauuguggggaagaaugccgu

SEQ ID NO: 3300 - RNA, 112 nt, Homo sapiens
uaaacacugaggcuuugauguuuauacgauauucuuccccacuaauuaacugcacuaaugaaguuaauuguggggaagaaugccguauaaaacaucaaagccucgauguuua

SEQ ID NO: 3301 - RNA, 22 nt, Homo sapiens
uagagcaauguguaggagaggc

SEQ ID NO: 3302 - RNA, 68 nt, Homo sapiens
caaguuagagcaauguguaggagaggcccaaauauguuuggccugcuuaaacacaugcuuucugcuug

SEQ ID NO: 3303 - RNA, 22 nt, Homo sapiens
uagcagauccaggaauagaagc

SEQ ID NO: 3304 - RNA, 62 nt, Homo sapiens
uuagcagauccaggaauagaagccagagucacuugacucugaauuuguucucuuucuguuaa

SEQ ID NO: 3305 - RNA, 22 nt, Homo sapiens
uggaugggguggaggaugcaga

SEQ ID NO: 3306 - RNA, 103 nt, Homo sapiens
cugaacccucuaagcccucugcccccgccuccugccagggucccaccgcuugaggacuucaaggugcuggaugggguggaggaugcagagggcgaggaggaag

SEQ ID NO: 3307 - RNA, 22 nt, Homo sapiens
uagugcuacagaacauuauucu

SEQ ID NO: 3308 - RNA, 63 nt, Homo sapiens
guuagugcuacagaacauuauucugguccucaagugcaaggauaaauuuuguggcacuuuuac

SEQ ID NO: 3309 - RNA, 22 nt, Homo sapiens
uaguggaucuuuucacuugggu

SEQ ID NO: 3310 - RNA, 80 nt, Homo sapiens; identical to SEQ ID NO: 1268

SEQ ID NO: 3311 - RNA, 22 nt, Homo sapiens
ucagagggcaaggaagcaaaga

SEQ ID NO: 3312 - RNA, 77 nt, Homo sapiens
uugaacaguucagagggcaaggaagcaaagagaagugcucugagugugucuuugcuugccagcuccugaauuuuuaa

SEQ ID NO: 3313 - RNA, 22 nt, Homo sapiens
uccugagcugagcugcggggaa

SEQ ID NO: 3314 - RNA, 71 nt, Homo sapiens
uuuguuccugagcugagcugcggggaaucacccuguuugaaauccucgaucagcucaugcuagagaagaga

SEQ ID NO: 3315 - RNA, 22 nt, Homo sapiens
ugaagugcuggcuguuuugcug

SEQ ID NO: 3316 - RNA, 96 nt, Homo sapiens
cacacuucagcaaauguagcuggcacuacgauggcugggaccccugugggaugcucagguugcaaguugaagugcuggcuguuuugcugauucaug

SEQ ID NO: 3317 - RNA, 22 nt, Homo sapiens
ugcuuguggcuauucuuaugac

SEQ ID NO: 3318 - RNA, 71 nt, Homo sapiens
auuuggucaagcugacagcuaugagcaaaaugcuacacaggaguugcuuguggcuauucuuaugaccaaau

SEQ ID NO: 3319 - RNA, 22 nt, Homo sapiens
uggaaggaggugggugggaaga

SEQ ID NO: 3320 - RNA, 87 nt, Homo sapiens
ggauuauuugcacauuuuccugaugacuucucucucucagaauucuuuuuuuguuggaaggaggugggugggaagagcaaauagucc

SEQ ID NO: 3321 - RNA, 22 nt, Homo sapiens
uuucucaucacaacccuagggu

SEQ ID NO: 3322 - RNA, 57 nt, Homo sapiens; identical to SEQ ID NO: 3264

SEQ ID NO: 3323 - RNA, 22 nt, Homo sapiens
ugugaggguacagggggaaggu

SEQ ID NO: 3324 - RNA, 75 nt, Homo sapiens
uaguugugaggguacagggggaagguagcuuuuggaggggccuggaagacccuucccuuugugccuucgauucug

SEQ ID NO: 3325 - RNA, 22 nt, Homo sapiens
uggacagagggggaaauccaga

SEQ ID NO: 3326 - RNA, 79 nt, Homo sapiens
acugucuguuggacagagggggaaauccagaaaggauuaguacucauucuggauuuucccuauggcuagcagguaaagu

SEQ ID NO: 3327 - RNA, 22 nt, Homo sapiens
uggagagacagguggauauuuu

SEQ ID NO: 3328 - RNA, 75 nt, Homo sapiens
uuuaguuggagagacagguggauauuuugagcucuguuaagcaguaaaguuuuuaugugucucucuggaaaugaa

SEQ ID NO: 3329 - RNA, 22 nt, Homo sapiens
uggauggggaggggcccaggcu

SEQ ID NO: 3330 - RNA, 64 nt, Homo sapiens
uuggauggggaggggcccaggcugagccgaggaggcuggagagccuggagugccccccauccaa

SEQ ID NO: 3331 - RNA, 22 nt, Homo sapiens
ugggagagauggaaagcaagau

SEQ ID NO: 3332 - RNA, 88 nt, Homo sapiens; identical to SEQ ID NO: 734

SEQ ID NO: 3333 - RNA, 22 nt, Homo sapiens
uggggcaggauggugagaggag

SEQ ID NO: 3334 - RNA, 80 nt, Homo sapiens
gccuuuccucuacuccacauccucccuaaaugcccucucucucuaccgagguuggggcaggauggugagaggagaugggc

SEQ ID NO: 3335 - RNA, 22 nt, Homo sapiens
ugggguaggaggguaagucuua

SEQ ID NO: 3336 - RNA, 86 nt, Homo sapiens
cuuuuguggguugggguaggaggguaagucuuacugaguuuaacaacacauacucagaagaagcucuccuuuucaaggcacagagg

SEQ ID NO: 3337 - RNA, 22 nt, Homo sapiens
ugggucuggaggaaggagaggc

SEQ ID NO: 3338 - RNA, 75 nt, Homo sapiens
gaucccucuucucuuuccuucugggcuccaaccauuccuccuauguugggucuggaggaaggagaggcagugguc

SEQ ID NO: 3339 - RNA, 22 nt, Homo sapiens
uucuuuuuuguggggaugcuuu

SEQ ID NO: 3340 - RNA, 80 nt, Homo sapiens
gaaguauaguuucuuuuuuguggggaugcuuugcauuuugcuugcaacucacauuccuagagaaaagagaacaguauuuc

SEQ ID NO: 3341 - RNA, 22 nt, Homo sapiens
uguuuuuggggguggguggccc

SEQ ID NO: 3342 - RNA, 124 nt, Homo sapiens
ggugucucagucucucugagccucagucuauaaaggggucacagacuccugguagccagugaacagggugguuguuuuuggggguggguggccccuagggcugugcagggaggccugggguacc

SEQ ID NO: 3343 - RNA, 22 nt, Homo sapiens
uugcagacugaucagagauggu

SEQ ID NO: 3344 - RNA, 94 nt, Homo sapiens
aggugcugucuaggaaacuaacuuuucaguuugcaagcagaggcugaccgcucuaaguuugcagacugaucagagauggugcuggcaguaaccu

SEQ ID NO: 3345 - RNA, 22 nt, Homo sapiens
uugugacccuggggaccauaug

SEQ ID NO: 3346 - RNA, 85 nt, Homo sapiens
aucuggcuugguuuucagcuucacuggauuuuaaucaaaaaccguguugagaauuguuugugacccuggggaccauaugacaggu

SEQ ID NO: 3347 - RNA, 22 nt, Homo sapiens
aaacaaggcaaucaugggcaga

SEQ ID NO: 3348 - RNA, 104 nt, Homo sapiens
agagccagcauauuaucuucccauuauuacucuguuuuaauaucuaacugacagaugcaugucacuaaaacaaggcaaucaugggcagaaaaugccccugcucu

SEQ ID NO: 3349 - RNA, 22 nt, Homo sapiens
aaaugagguugcaggggaaggg

SEQ ID NO: 3350 - RNA, 98 nt, Homo sapiens
aggugaaugauggaugaauaaaaugagguugcaggggaagggcugugggaaagcuggccuccccccugcaaaacguugcugucuacacucauccaccu

SEQ ID NO: 3351 - RNA, 22 nt, Homo sapiens
aacucuguagugcuaucagggg

SEQ ID NO: 3352 - RNA, 96 nt, Homo sapiens
gugaaggcagaaauugcuaaacucuguagugcuaucaggggcacaugggcaucuuccuggaacuagcacuaccagaguguagcccucucccuacau

SEQ ID NO: 3353 - RNA, 22 nt, Homo sapiens
aaggguuaaaguguaugggcuu

SEQ ID NO: 3354 - RNA, 75 nt, Homo sapiens
cuccuaaaggguuaaaguguaugggcuuuauuuuccaaacugucgcaaagcaccugcauuuuacucuuguaggag

SEQ ID NO: 3355 - RNA, 22 nt, Homo sapiens
agaaaaggggaagaaagccagg

SEQ ID NO: 3356 - RNA, 68 nt, Homo sapiens
gugguuuuccuuucugacccuucucauugaaaccuugggagaaaaggggaagaaagccaggaugucac

SEQ ID NO: 3357 - RNA, 21 nt, Homo sapiens
uuggaggggugccagcauucg

SEQ ID NO: 3358 - RNA, 93 nt, Homo sapiens
ggcuucggugcugcuccaguguuuggcagcccuccuacuuuugggggauccccuggguuuggaggggugccagcauucgguucagccccagcc

SEQ ID NO: 3359 - RNA, 21 nt, Homo sapiens
uacauggaugggcggggaggu

SEQ ID NO: 3360 - RNA, 81 nt, Homo sapiens
aucuucagguuacagucucuagcuucgccauguacauggcccuuccguguacauggaugggcggggagguaacuaaaagau

SEQ ID NO: 3361 - RNA, 21 nt, Homo sapiens
uuucauagccugaggaaggcc

SEQ ID NO: 3362 - RNA, 105 nt, Homo sapiens
gcuagggggguaaccucaagcuauggaaaaaauuaggguuagacaugaaguauuuuuucauagccugaggaaggccccaugggcuaagacgaacaaaagguuugu

SEQ ID NO: 3363 - RNA, 21 nt, Homo sapiens
uaagacgaacaaaagguuugu

SEQ ID NO: 3364 - RNA, 83 nt, Homo sapiens; identical to SEQ ID NO: 82

SEQ ID NO: 3365 - RNA, 21 nt, Homo sapiens
uggaagggccgcugagcaaau

SEQ ID NO: 3366 - RNA, 93 nt, Homo sapiens
cgagugacgucaggccguuuguugucauuggcggcucccaagauggcguccaucauggaagggccgcugagcaaauggacuaacgugaugaag

SEQ ID NO: 3367 - RNA, 21 nt, Homo sapiens
ucacuaaccacacggccaggu

SEQ ID NO: 3368 - RNA, 77 nt, Homo sapiens; identical to SEQ ID NO: 1882

SEQ ID NO: 3369 - RNA, 21 nt, Homo sapiens
ugaggaggagugugauuacca

SEQ ID NO: 3370 - RNA, 89 nt, Homo sapiens
cgucuagggagccaccagugguguaagugcuuuggcuaagugauggagacaacugaggaggagugugauuaccacuggguuccugaaug

SEQ ID NO: 3371 - RNA, 21 nt, Homo sapiens
ugggcggacacgacauucccg

SEQ ID NO: 3372 - RNA, 87 nt, Homo sapiens
gaaagagcacugggcggacacgacauucccgauggcuucucgggugcccacucaacgggagugaucgugucauuccaaagcgcuuuc

SEQ ID NO: 3373 - RNA, 21 nt, Homo sapiens
ugucagaagauuaauuaugcu

SEQ ID NO: 3374 - RNA, 92 nt, Homo sapiens
uuugucauggugucagaagauuaauuaugcucgugugagaacagcuuucucauuggguaaaaagagacauuauccuucugacuugugacaga

SEQ ID NO: 3375 - RNA, 21 nt, Homo sapiens
ucagcucaguaggcacgggag

SEQ ID NO: 3376 - RNA, 85 nt, Homo sapiens
gggcuugaccccuguuccugcugaacugagccaguguacacaaaccaacuguguuucagcucaguaggcacgggaggcagagccc

SEQ ID NO: 3377 - RNA, 21 nt, Homo sapiens
uaacaugguccacuaacucuc

SEQ ID NO: 3378 - RNA, 86 nt, Homo sapiens
ugguuccugaagagaugguagacuauggaacguaggcguuaugauuucugaccuauguaacaugguccacuaacucucaguaucca

SEQ ID NO: 3379 - RNA, 21 nt, Homo sapiens
ugggaugguaaaccgcuucuu

SEQ ID NO: 3380 - RNA, 87 nt, Homo sapiens
gugcgguacuugaagaaaugguuuaccgucccacauacauuuugaauauguaugugggaugguaaaccgcuucuugguauccagccc

SEQ ID NO: 3381 - RNA, 21 nt, Homo sapiens
uguaauaugguccacaucuuc

SEQ ID NO: 3382 - RNA, 80 nt, Homo sapiens
gguaccugaaaagaugguugaccauagaacaugcgcuaucucugugucguauguaauaugguccacaucuucucaauauc

SEQ ID NO: 3383 - RNA, 21 nt, Homo sapiens
ugggauaucaucauauacugu

SEQ ID NO: 3384 - RNA, 86 nt, Homo sapiens; identical to SEQ ID NO: 1052

SEQ ID NO: 3385 - RNA, 21 nt, Homo sapiens
ugccggagacggaccagugga

SEQ ID NO: 3386 - RNA, 99 nt, Homo sapiens
ggccgcauggaccacguggaccgcugcuucgacgugcuggcuguggaguacuaugugccggagacggaccaguggaccagcgugagccccaugcgggcc

SEQ ID NO: 3387 - RNA, 21 nt, Homo sapiens
agacgccgaggggaaaaugga

SEQ ID NO: 3388 - RNA, 87 nt, Homo sapiens
uaggcacgcagcuuuggagacgccgaggggaaaauggauuuaauugauucguuaccucugguauuguaaugccugcugcgauguuua

SEQ ID NO: 3389 - RNA, 21 nt, Homo sapiens
cggcucugggucuguggggag

SEQ ID NO: 3390 - RNA, 95 nt, Homo sapiens; identical to SEQ ID NO: 180

SEQ ID NO: 3391 - RNA, 21 nt, Homo sapiens
uugcacaaagagucucauguc

SEQ ID NO: 3392 - RNA, 68 nt, Homo sapiens
uucuccuuuuugcacaaagagucucaugucugauauuuagacaugaugagcuuugugcaaaaggggag

SEQ ID NO: 3393 - RNA, 21 nt, Homo sapiens
uccaacaauauccuggugcug

SEQ ID NO: 3394 - RNA, 67 nt, Homo sapiens; identical to SEQ ID NO: 192

SEQ ID NO: 3395 - RNA, 21 nt, Homo sapiens
ugggggcaucuuuuuucaggc

SEQ ID NO: 3396 - RNA, 90 nt, Homo sapiens
aaggucuuuggucuuggaggaaggugugcuacuggaagaggccaccgaggcagggcuggugggggcaucuuuuuucaggcuacgggccuu

SEQ ID NO: 3397 - RNA, 21 nt, Homo sapiens
uggcagccaggcugagggaag

SEQ ID NO: 3398 - RNA, 91 nt, Homo sapiens
ccagcugcccgggaagcuuggcagccaggcugagggaaggaagcaucggcucucuuugaaggucggcugccagugaaucucaggcagcugg

SEQ ID NO: 3399 - RNA, 21 nt, Homo sapiens
uugccauggagacaacuccgg

SEQ ID NO: 3400 - RNA, 97 nt, Homo sapiens
cggacuaacacuccgcggguguuuccauggagaccgaggccgagccugcgcggccucacggcguugccauggagacaacuccggggcuggggcuccg

SEQ ID NO: 3401 - RNA, 21 nt, Homo sapiens
ugggagaaggcuguuuacucu

SEQ ID NO: 3402 - RNA, 72 nt, Homo sapiens
agauacuguaaacauccuacacucucagcuguggaaaguaagaaagcugggagaaggcuguuuacucuuucu

SEQ ID NO: 3403 - RNA, 21 nt, Homo sapiens
uagauggggucguugagaaug

SEQ ID NO: 3404 - RNA, 87 nt, Homo sapiens
ucuugggaauguagccgccccggccucgagaaggaccccaggcaacugaguuguagauggggucguugagaaugggauggcccaaga

SEQ ID NO: 3405 - RNA, 21 nt, Homo sapiens
ugcauuuuaccuuugggaaua

SEQ ID NO: 3406 - RNA, 92 nt, Homo sapiens
ugcauuucagagaauaugcauuuuaccuuugggaauauguuaauuucaggcagcauucccuaugggaaaggugauaccagcucugauaugca

SEQ ID NO: 3407 - RNA, 21 nt, Homo sapiens
ugccaacauauugccaucuuu

SEQ ID NO: 3408 - RNA, 71 nt, Homo sapiens; identical to SEQ ID NO: 3122

SEQ ID NO: 3409 - RNA, 21 nt, Homo sapiens
ugcaauuggccacuugcacca

SEQ ID NO: 3410 - RNA, 78 nt, Homo sapiens
uagcuaauugcaggugcaauuggccacuugcaccaucaguugaagggcaagugguuaauugagcccacaagugaccua

SEQ ID NO: 3411 - RNA, 21 nt, Homo sapiens
ugguaauuaugugcguaaauc

SEQ ID NO: 3412 - RNA, 91 nt, Homo sapiens
uucucaucuugauguguggggcuguacagacauaaaugccauuagcauuaaugguaauuaugugcguaaauccccaugcucucaaugagaa

SEQ ID NO: 3413 - RNA, 21 nt, Homo sapiens
ggagagaggcgcagacaagag

SEQ ID NO: 3414 - RNA, 84 nt, Homo sapiens
ggagagaggcgcagacaagagaaaauaagccugcccagcaaucaugucuggggcugcugggagggcucucucuguucucuuucc

SEQ ID NO: 3415 - RNA, 21 nt, Homo sapiens
cagcugguugaaggggaccaa

SEQ ID NO: 3416 - RNA, 94 nt, Homo sapiens
gccaucaaugcacagcuacagcugguugaaggggaccaaauccauuggacagucgauuugguuccauuuuaccagcucuagcaaagcauuuggc

SEQ ID NO: 3417 - RNA, 21 nt, Homo sapiens
uggggguacaauuagccucug

SEQ ID NO: 3418 - RNA, 96 nt, Homo sapiens
uacaccugaaacuucucacuuggggguacaauuagccucuggcgccuuuagaaugaguugcuggugacuaauuaugcccucaaggaggcauuugua

SEQ ID NO: 3419 - RNA, 21 nt, Homo sapiens
uggcagcggcaaauuguuguu

SEQ ID NO: 3420 - RNA, 71 nt, Homo sapiens
gggaggcuggcagcggcaaauuguuguuuacuuuuaauuaaguaaacaaugucggcuuuccgccuccuccc

SEQ ID NO: 3421 - RNA, 21 nt, Homo sapiens
aaagagggggugaggcucugg

SEQ ID NO: 3422 - RNA, 87 nt, Homo sapiens
ucccgcagccggugacuggagcccaccucugcagagacaaagguuagaaaaagagggggugaggcucugggaaagcagaaugcgggg

SEQ ID NO: 3423 - RNA, 21 nt, Homo sapiens
uucaauggugguggggaaauu

SEQ ID NO: 3424 - RNA, 90 nt, Homo sapiens
caagagucacugacacaagcucuacaacuauugaacuagaaugggaacccccagcuuucaauggugguggggaaauuguuggcuauuuug

SEQ ID NO: 3425 - RNA, 21 nt, Homo sapiens
ucccacagggaauuuauauuu

SEQ ID NO: 3426 - RNA, 93 nt, Homo sapiens
ccucauucacauuaagauguaaauuagcaauucccugcaaggcuuaauagggucucucccacagggaauuuauauuuuaaugugaaccaaagg

SEQ ID NO: 3427 - RNA, 21 nt, Homo sapiens
uccaagaggaggagggcgacg

SEQ ID NO: 3428 - RNA, 80 nt, Homo sapiens
aggguuuggcguuguugucagccucggggagagagauuggacaaauauucuccaagaggaggagggcgacgccaaggacu

SEQ ID NO: 3429 - RNA, 21 nt, Homo sapiens
ggagagggguggaguggccug

SEQ ID NO: 3430 - RNA, 79 nt, Homo sapiens
acugaaguggggccaguucuccgccucuuuuaacuuuacugccaaggcaggagagggguggaguggccuggaagacagu

SEQ ID NO: 3431 - RNA, 21 nt, Homo sapiens
uagcugccaggugccaugggg

SEQ ID NO: 3432 - RNA, 81 nt, Homo sapiens
uggagaugagguagcugccaggugccauggggguauaggugacgcgguagcccucagggcacuccuggcaauccaucuuca

SEQ ID NO: 3433 - RNA, 21 nt, Homo sapiens
uggggaugcgaggacagcugg

SEQ ID NO: 3434 - RNA, 99 nt, Homo sapiens
cccaguggguguccagaugccugacaacauucuccaggccaagauacauaagaguccuguggucuggggaugcgaggacagcuggacaaacagcuuggg

SEQ ID NO: 3435 - RNA, 21 nt, Homo sapiens
ugagcuggauugagaacaaca

SEQ ID NO: 3436 - RNA, 73 nt, Homo sapiens
cugugucucaacagccaccaaauccaguucagggcgguuugagccaguuucugagcuggauugagaacaacag

SEQ ID NO: 3437 - RNA, 21 nt, Homo sapiens
ugugaugagcgggaugcggaa

SEQ ID NO: 3438 - RNA, 98 nt, Homo sapiens
gagugccccgcggaguggcugugaugagcgggaugcggaagguguccacugagccgaucugucucccgcucacccacagcaguugcuccauggucacc

SEQ ID NO: 3439 - RNA, 21 nt, Homo sapiens
ugugaugcaguugcggaggua

SEQ ID NO: 3440 - RNA, 83 nt, Homo sapiens
caaggaccgauucuuacgacagcuggauuucaacagcuccaaagauguagcugugaugcaguugcggagguaaaucggacuug

SEQ ID NO: 3441 - RNA, 21 nt, Homo sapiens
ugggguguggaggggaggaaa

SEQ ID NO: 3442 - RNA, 94 nt, Homo sapiens
cucaaguguggggagucaugggguguggaggggaggaaaggaaagguauuuuguuucuuugucuauacauuuccuagauuucuaugcaguuggg

SEQ ID NO: 3443 - RNA, 21 nt, Homo sapiens
ugaagguggugccaugcuggg

SEQ ID NO: 3444 - RNA, 93 nt, Homo sapiens
cagugccuccugggcccaguuuggcugaugcucucaucaguucuccgauuuuggcuggugaagguggugccaugcugggucuuggugccagug

SEQ ID NO: 3445 - RNA, 21 nt, Homo sapiens
ugccaagauauauucacagcu

SEQ ID NO: 3446 - RNA, 92 nt, Homo sapiens
uauauguauguauauauagauagauauguaaaacuuggcaucucuuccaggagauaugccaagauauauucacagcuuuauauacacaugua

SEQ ID NO: 3447 - RNA, 21 nt, Homo sapiens
uaggagagaugcuggaggugg

SEQ ID NO: 3448 - RNA, 89 nt, Homo sapiens
ggugugaaaggguaggagagaugcuggaggugggggugcuguguuuuagaccccccauauuaucccaguguccccugccccccucuucc

SEQ ID NO: 3449 - RNA, 21 nt, Homo sapiens
ugcucaugugggagagauuag

SEQ ID NO: 3450 - RNA, 79 nt, Homo sapiens
uccuccucaggugcucaugugggagagauuagcuuguguuuauaagccgaucuguucauuaagcgccugcuggugugga

SEQ ID NO: 3451 - RNA, 21 nt, Homo sapiens
ugggaggaaggagccugggaa

SEQ ID NO: 3452 - RNA, 96 nt, Homo sapiens; identical to SEQ ID NO: 1796

SEQ ID NO: 3453 - RNA, 21 nt, Homo sapiens
uacaagaggccagagggugag

SEQ ID NO: 3454 - RNA, 74 nt, Homo sapiens
auguuugccggggugugugguuucuugucggcacgcucugaugugugagguacaagaggccagagggugagcau

SEQ ID NO: 3455 - RNA, 21 nt, Homo sapiens
cgggaaguggagggaggaagu

SEQ ID NO: 3456 - RNA, 79 nt, Homo sapiens
cuccgcucagagccuuuuccucuccacuuccuguucacacaggggggggcgggaaguggagggaggaaguuggggggag

SEQ ID NO: 3457 - RNA, 21 nt, Homo sapiens
ugacgguggaggcuauaauuu

SEQ ID NO: 3458 - RNA, 86 nt, Homo sapiens
gguggugagaaauuuugucuucaagcaaaggucauuggaccagacuuuuggauuuagugacgguggaggcuauaauuuuuccugcu

SEQ ID NO: 3459 - RNA, 21 nt, Homo sapiens
ugguuuacaaaguaauucaua

SEQ ID NO: 3460 - RNA, 96 nt, Homo sapiens; identical to SEQ ID NO: 3226

SEQ ID NO: 3461 - RNA, 21 nt, Homo sapiens
aacgagaaaggaggagggcgc

SEQ ID NO: 3462 - RNA, 86 nt, Homo sapiens
gugagugcgcgaacgagaaaggaggagggcgcuccaggcgacagcacugcagacgccauuauccucuguuucucugcugcaccgac

SEQ ID NO: 3463 - RNA, 21 nt, Homo sapiens
uaugaggaacagcaggauggg

SEQ ID NO: 3464 - RNA, 71 nt, Homo sapiens
gaggugcccaggucagugcgcugguucauagaggcggacgugucuaugaggaacagcaggaugggcaucuu

SEQ ID NO: 3465 - RNA, 21 nt, Homo sapiens
ucuguagauuguggacaaagc

SEQ ID NO: 3466 - RNA, 93 nt, Homo sapiens
ugacauuuucuguagauuguggacaaagcccuagaagagccaaaguauagcucacuguaugcucagcuaugucugcgauuggcagaagaugca

SEQ ID NO: 3467 - RNA, 21 nt, Homo sapiens
ugaugauggcuucugggaagg

SEQ ID NO: 3468 - RNA, 86 nt, Homo sapiens
ugaguuaucuuuuccugagggagcaauaauccguaucuugaacaaagaaaaccaagaugaugauggcuucugggaaggggaauuca

SEQ ID NO: 3469 - RNA, 21 nt, Homo sapiens
uggcaguggaguuagugauug

SEQ ID NO: 3470 - RNA, 94 nt, Homo sapiens
ugcugugccuuguuuugauggcaguggaguuagugauuguaaccaccacaguacaaucagcuaaugacacugccuacaaaccgagcaccgggca

SEQ ID NO: 3471 - RNA, 21 nt, Homo sapiens
ugggucuuggcggcuuuguug

SEQ ID NO: 3472 - RNA, 89 nt, Homo sapiens
gcuucuucucccgggcaagcugccuucggauccgcugcuggcacacagccagcugggucuuggcggcuuuguuguugggguagagcugc

SEQ ID NO: 3473 - RNA, 21 nt, Homo sapiens
ucguugcgggcguggggaaug

SEQ ID NO: 3474 - RNA, 90 nt, Homo sapiens
cgguagcccaagccuugcaggccccagcggaaugaccagggcgauggaaggaagucgugcucguugcgggcguggggaaugggcuuaccg

SEQ ID NO: 3475 - RNA, 21 nt, Homo sapiens
ugucagaggugacaggggcca

SEQ ID NO: 3476 - RNA, 88 nt, Homo sapiens
guaaauuauguuuuguuuucugucagcugccugacagcuaaaaucauauuugcugucagaggugacaggggccacaauagugauguau

SEQ ID NO: 3477 - RNA, 21 nt, Homo sapiens
uagcagcguuggcggucccuc

SEQ ID NO: 3478 - RNA, 75 nt, Homo sapiens; identical to SEQ ID NO: 2716

SEQ ID NO: 3479 - RNA, 21 nt, Homo sapiens
cagcaggagggugguaaucau

SEQ ID NO: 3480 - RNA, 78 nt, Homo sapiens
ccaucuuuguauuuggcgaccacccgacugcccacauacagcuugucagcaggagggugguaaucauaggcaauaugg

SEQ ID NO: 3481 - RNA, 21 nt, Homo sapiens
gggcucggggcacguggaggg

SEQ ID NO: 3482 - RNA, 93 nt, Homo sapiens
agcugagccuacccucgucacggggccccggcucacccuccaggaggcgggcaaagggcucggggcacguggagggaaugggcagcgucagcu

SEQ ID NO: 3483 - RNA, 21 nt, Homo sapiens
uggucuguguagauacauaug

SEQ ID NO: 3484 - RNA, 90 nt, Homo sapiens
caaaauuuugcguguggucuguguagauacauauguauauccguauauacauauguauauguacacagucauuauuauguauauauuuug

SEQ ID NO: 3485 - RNA, 21 nt, Homo sapiens
uggcuggaaucaagggccagg

SEQ ID NO: 3486 - RNA, 100 nt, Homo sapiens
agauauugguggcuggaaucaagggccaggccccagaaaaguuucacagaagggacauacauagggccaaauuggacccuccgauucacaccggguaucu

SEQ ID NO: 3487 - RNA, 21 nt, Homo sapiens
ugggggugguggggaucagug

SEQ ID NO: 3488 - RNA, 98 nt, Homo sapiens
cucacuggggaugaugggggugguggggaucaguggcucagugcacagagaggaggaggacgggcugcugccacugccuccaccaaacuccccaugag

SEQ ID NO: 3489 - RNA, 21 nt, Homo sapiens
ucacaguugauauagccacag

SEQ ID NO: 3490 - RNA, 86 nt, Homo sapiens
ggagacacuacugguuguguaguugaaaucagaacagaugaugcaagguguccuguuuucacaguugauauagccacaguguuucc

SEQ ID NO: 3491 - RNA, 21 nt, Homo sapiens
uagcaucucuaaugugaacaa

SEQ ID NO: 3492 - RNA, 94 nt, Homo sapiens
cacugccuuuuguucuuuggaagacacucauuaacauuugcuaauguaugcuaaugagcaauaauuagcaucucuaaugugaacaaaagcagug

SEQ ID NO: 3493 - RNA, 21 nt, Homo sapiens
ugccuggagaaaaaggagagc

SEQ ID NO: 3494 - RNA, 93 nt, Homo sapiens
ugccuggguugccuggagaaaaaggagagcgaggauuuccuggaauacaggguccaccuggccuuccuggaccuccagguaaaugagauugca

SEQ ID NO: 3495 - RNA, 21 nt, Homo sapiens
aaacaacaauuugccgcugcc

SEQ ID NO: 3496 - RNA, 71 nt, Homo sapiens
gggaggaggcggaaagccgacauuguuuacuuaauuaaaaguaaacaacaauuugccgcugccagccuccc

SEQ ID NO: 3497 - RNA, 21 nt, Homo sapiens
uucugugaugugggggcugag

SEQ ID NO: 3498 - RNA, 73 nt, Homo sapiens
gcugcuuuaguagacacucacgucauagucuucagugaggagauagucuucugugaugugggggcugagcagu

SEQ ID NO: 3499 - RNA, 21 nt, Homo sapiens
aggcagguagcaagccaugaa

SEQ ID NO: 3500 - RNA, 93 nt, Homo sapiens
ggcuacaguaggcuugcugcccaguccaaggccagcaguguugugucuggccuguaagaggcagguagcaagccaugaauauguccaaaggcc

SEQ ID NO: 3501 - RNA, 21 nt, Homo sapiens
uaagacacaggcccagagagg

SEQ ID NO: 3502 - RNA, 89 nt, Homo sapiens
ggcagagcgcugccucucugcaggccgugugcuuugcucgguugaucuugcagagccuaagacacaggcccagagaggcagugaucgcc

SEQ ID NO: 3503 - RNA, 21 nt, Homo sapiens
ugggaugcaacuggcccccuu

SEQ ID NO: 3504 - RNA, 84 nt, Homo sapiens
gggcuggagagguugggugcgcuugugcguuucacuuucccauugugaaagugggaugcaacuggcccccuuccucauccucuc

SEQ ID NO: 3505 - RNA, 21 nt, Homo sapiens
ugcaggagagaugugcaggca

SEQ ID NO: 3506 - RNA, 96 nt, Homo sapiens
guucucaucccccagccucucauuccuaucuccuguguggagauuugccuuugaagucaugcaggagagaugugcaggcaugaaggagaugagaac

SEQ ID NO: 3507 - RNA, 21 nt, Homo sapiens
ugauaaauauuuuggcugacu

SEQ ID NO: 3508 - RNA, 91 nt, Homo sapiens
gaauuaaaauccuguugauaaauauuuuggcugacuguuuccuacugaggcuggcauuuagccaacauauuuguuaacugagcugugauuu

SEQ ID NO: 3509 - RNA, 21 nt, Homo sapiens
uggcagaaguggcagagcaug

SEQ ID NO: 3510 - RNA, 91 nt, Homo sapiens
accuugaagugcuccaugucaacacagccauuucugguacagggaaagcugacauuguggcagaaguggcagagcauggagucuauggggu

SEQ ID NO: 3511 - RNA, 21 nt, Homo sapiens
uggcugagggguagcuugggg

SEQ ID NO: 3512 - RNA, 94 nt, Homo sapiens
gguuggagacauggcugagggguagcuugggggauaacacucaggagacuggggugugaccaccacccggcggacuccaguacuaucuucaauc

SEQ ID NO: 3513 - RNA, 21 nt, Homo sapiens
ugaagacgguggaggauugug

SEQ ID NO: 3514 - RNA, 96 nt, Homo sapiens
agcugcacccguggugaagacgguggaggauuguggcagccuagugaaugggcagccgcaguaugucaugcaaguuucagccaaggacgggcagcu

SEQ ID NO: 3515 - RNA, 21 nt, Homo sapiens
uggggcggccacagacucgac

SEQ ID NO: 3516 - RNA, 92 nt, Homo sapiens
gaccaucguuguucaagguguuguguucagggcccuuccagguaauugaggcuuuggggcggccacagacucgacaucuaagaacaacgguc

SEQ ID NO: 3517 - RNA, 21 nt, Homo sapiens
uuggugguugggggacaggcu

SEQ ID NO: 3518 - RNA, 89 nt, Homo sapiens
ucaccauuaucuccuuggccuugaguucuccacucgcaaauuacaacuugucucaauuggugguugggggacaggcugggauaauggga

SEQ ID NO: 3519 - RNA, 21 nt, Homo sapiens
ugaaggagacagccaaucagc

SEQ ID NO: 3520 - RNA, 97 nt, Homo sapiens
aguuucguucagggcgugaaggagacagccaaucagcgggccguuauuuacaugggcucucugauuggcucucacggugccucuuuagaauguuacu

SEQ ID NO: 3521 - RNA, 21 nt, Homo sapiens
acacacugugggguggcacuc

SEQ ID NO: 3522 - RNA, 77 nt, Homo sapiens
gcaggacacacugugggguggcacucauagagcagcaugcgguugaugcauucagagucuaucccacagggguucuc

SEQ ID NO: 3523 - RNA, 21 nt, Homo sapiens
cccgaggaggguugugggccc

SEQ ID NO: 3524 - RNA, 68 nt, Homo sapiens
gggccccgaggaggguugugggcccuuuuuugugaaugaagcgccacggaacagcccuccuggggucc

SEQ ID NO: 3525 - RNA, 22 nt, Homo sapiens
ugagguaguagguugugugguu

SEQ ID NO: 3526 - RNA, 83 nt, Homo sapiens
cggggugagguaguagguugugugguuucagggcagugauguugccccucggaagauaacuauacaaccuacugccuucccug

SEQ ID NO: 3527 - RNA, 21 nt, Homo sapiens
ugagguaggagguuguauagu

SEQ ID NO: 3528 - RNA, 79 nt, Homo sapiens
cccgggcugagguaggagguuguauaguugaggaggacacccaaggagaucacuauacggccuccuagcuuuccccagg

SEQ ID NO: 3529 - RNA, 21 nt, Homo sapiens
uggaauguaaagaaguaugua

SEQ ID NO: 3530 - RNA, 71 nt, Homo sapiens
ugggaaacauacuucuuuauaugcccauauggaccugcuaagcuauggaauguaaagaaguauguaucuca

SEQ ID NO: 3531 - RNA, 22 nt, Homo sapiens
aacccguagauccgaacuugug

SEQ ID NO: 3532 - RNA, 80 nt, Homo sapiens
ccuguugccacaaacccguagauccgaacuugugguauuaguccgcacaagcuuguaucuauagguaugugucuguuagg

SEQ ID NO: 3533 - RNA, 22 nt, Homo sapiens
uacaguacugugauaacugaag

SEQ ID NO: 3534 - RNA, 79 nt, Homo sapiens
acuguccuuuuucgguuaucaugguaccgaugcuguauaucugaaagguacaguacugugauaacugaagaaugguggu

SEQ ID NO: 3535 - RNA, 22 nt, Homo sapiens
aaugcaccugggcaaggauuca

SEQ ID NO: 3536 - RNA, 86 nt, Homo sapiens
ugcucccccucucuaauccuugcuaucugggugcuagugcuggcucaaugcaaugcaccugggcaaggauucagagagggggagcu

SEQ ID NO: 3537 - RNA, 20 nt, Homo sapiens
ucaaaugcucagacuccugu

SEQ ID NO: 3538 - RNA, 81 nt, Homo sapiens
ugugcaucguggucaaaugcucagacuccugugguggcugcuuaugcaccacggauguuugagcaugugcuauggugucua

SEQ ID NO: 3539 - RNA, 24 nt, Homo sapiens
aaaagugcuuacagugcagguagc

SEQ ID NO: 3540 - RNA, 81 nt, Homo sapiens
ccuuggccauguaaaagugcuuacagugcagguagcuuuuugagaucuacugcaauguaagcacuucuuacauuaccaugg

SEQ ID NO: 3541 - RNA, 21 nt, Homo sapiens
uaaagugcugacagugcagau

SEQ ID NO: 3542 - RNA, 82 nt, Homo sapiens; identical to SEQ ID NO: 2662

SEQ ID NO: 3543 - RNA, 23 nt, Homo sapiens
uacccuguagauccgaauuugug

SEQ ID NO: 3544 - RNA, 110 nt, Homo sapiens; identical to SEQ ID NO: 1034

SEQ ID NO: 3545 - RNA, 22 nt, Homo sapiens
uacccuguagaaccgaauuugu

SEQ ID NO: 3546 - RNA, 110 nt, Homo sapiens; identical to SEQ ID NO: 1916

SEQ ID NO: 3547 - RNA, 22 nt, Homo sapiens
ggacacaguggcacgggguggc

SEQ ID NO: 3548 - RNA, 105 nt, Homo sapiens
agcauggaacaagccagaaucccucucuuaccccgagagcuggucccuccaggucaggguugggacacaguggcacgggguggcuguggguggcuugcacugccg

SEQ ID NO: 3549 - RNA, 23 nt, Homo sapiens
uggagugugacaaugguguuugu

SEQ ID NO: 3550 - RNA, 85 nt, Homo sapiens; identical to SEQ ID NO: 2084

SEQ ID NO: 3551 - RNA, 22 nt, Homo sapiens
uuaaggcacgcggugaaugcca

SEQ ID NO: 3552 - RNA, 109 nt, Homo sapiens; identical to SEQ ID NO: 1068

SEQ ID NO: 3553 - RNA, 23 nt, Homo sapiens
ucccugagacccuuuaaccugug

SEQ ID NO: 3554 - RNA, 86 nt, Homo sapiens; identical to SEQ ID NO: 1918

SEQ ID NO: 3555 - RNA, 22 nt, Homo sapiens
ucccugagacccuaacuuguga

SEQ ID NO: 3556 - RNA, 89 nt, Homo sapiens; identical to SEQ ID NO: 1064

SEQ ID NO: 3557 - RNA, 21 nt, Homo sapiens
ucguaccgugaguaauaaugc

SEQ ID NO: 3558 - RNA, 85 nt, Homo sapiens
cgcuggcgacgggacauuauuacuuuugguacgcgcugugacacuucaaacucguaccgugaguaauaaugcgccguccacggca

SEQ ID NO: 3559 - RNA, 22 nt, Homo sapiens
ucggauccgucugagcuuggcu

SEQ ID NO: 3560 - RNA, 97 nt, Homo sapiens
ugugaucacugucuccagccugcugaagcucagagggcucugauucagaaagaucaucggauccgucugagcuuggcuggucggaagucucaucauc

SEQ ID NO: 3561 - RNA, 22 nt, Homo sapiens
ucacagugaaccggucucuuuu

SEQ ID NO: 3562 - RNA, 82 nt, Homo sapiens; identical to SEQ ID NO: 2614

SEQ ID NO: 3563 - RNA, 22 nt, Homo sapiens
ucacagugaaccggucucuuuc

SEQ ID NO: 3564 - RNA, 84 nt, Homo sapiens; identical to SEQ ID NO: 2866

SEQ ID NO: 3565 - RNA, 21 nt, Homo sapiens
cuuuuugcggucugggcuugc

SEQ ID NO: 3566 - RNA, 90 nt, Homo sapiens; identical to SEQ ID NO: 1576

SEQ ID NO: 3567 - RNA, 22 nt, Homo sapiens
cagugcaauguuaaaagggcau

SEQ ID NO: 3568 - RNA, 89 nt, Homo sapiens
ugcugcuggccagagcucuuuucacauugugcuacugucugcaccugucacuagcagugcaauguuaaaagggcauuggccguguagug

SEQ ID NO: 3569 - RNA, 22 nt, Homo sapiens
cagugcaaugaugaaagggcau

SEQ ID NO: 3570 - RNA, 82 nt, Homo sapiens; identical to SEQ ID NO: 1340

SEQ ID NO: 3571 - RNA, 22 nt, Homo sapiens
cuugucugcaggcagugaagug

SEQ ID NO: 3572 - RNA, 105 nt, Homo sapiens
uaacgcuuuucccugcucugcuugucugcaggcagugaagugaaaucugcaagaguccugcucgcucaaggccugcauacaggaaagaagcaggggaaaagcguu

SEQ ID NO: 3573 - RNA, 22 nt, Homo sapiens
uaacagucuacagccauggucg

SEQ ID NO: 3574 - RNA, 101 nt, Homo sapiens; identical to SEQ ID NO: 2618

SEQ ID NO: 3575 - RNA, 22 nt, Homo sapiens
uugguccccuucaaccagcugu

SEQ ID NO: 3576 - RNA, 102 nt, Homo sapiens; identical to SEQ ID NO: 1256

SEQ ID NO: 3577 - RNA, 21 nt, Homo sapiens
uugguccccuucaaccagcua

SEQ ID NO: 3578 - RNA, 119 nt, Homo sapiens
ccucagaagaaagaugcccccugcucuggcuggucaaacggaaccaaguccgucuuccugagagguuugguccccuucaaccagcuacagcagggcuggcaaugcccaguccuuggaga

SEQ ID NO: 3579 - RNA, 21 nt, Homo sapiens
ugugacugguugaccagaggg

SEQ ID NO: 3580 - RNA, 73 nt, Homo sapiens
cagggugugugacugguugaccagaggggcaugcacuguguucacccugugggccaccuagucaccaacccuc

SEQ ID NO: 3581 - RNA, 22 nt, Homo sapiens
uauggcuuuucauuccuaugug

SEQ ID NO: 3582 - RNA, 97 nt, Homo sapiens
cacucugcuguggccuauggcuuuucauuccuaugugauugcugucccaaacucauguagggcuaaaagccaugggcuacagugaggggcgagcucc

SEQ ID NO: 3583 - RNA, 22 nt, Homo sapiens
uauugcuuaagaauacgcguag

SEQ ID NO: 3584 - RNA, 102 nt, Homo sapiens; identical to SEQ ID NO: 3148

SEQ ID NO: 3585 - RNA, 17 nt, Homo sapiens
agcugguguugugaauc

SEQ ID NO: 3586 - RNA, 99 nt, Homo sapiens; identical to SEQ ID NO: 1400

SEQ ID NO: 3587 - RNA, 18 nt, Homo sapiens
ucuacagugcacgugucu

SEQ ID NO: 3588 - RNA, 68 nt, Homo sapiens; identical to SEQ ID NO: 2734

SEQ ID NO: 3589 - RNA, 21 nt, Homo sapiens
agugguuuuacccuaugguag

SEQ ID NO: 3590 - RNA, 100 nt, Homo sapiens
ugugucucucucuguguccugccagugguuuuacccuaugguagguuacgucaugcuguucuaccacaggguagaaccacggacaggauaccggggcacc

SEQ ID NO: 3591 - RNA, 22 nt, Homo sapiens
uaacacugucugguaaagaugg

SEQ ID NO: 3592 - RNA, 95 nt, Homo sapiens
cggccggcccuggguccaucuuccaguacaguguuggauggucuaauugugaagcuccuaacacugucugguaaagauggcucccggguggguuc

SEQ ID NO: 3593 - RNA, 20 nt, Homo sapiens
cauaaaguagaaagcacuac

SEQ ID NO: 3594 - RNA, 87 nt, Homo sapiens
gacagugcagucacccauaaaguagaaagcacuacuaacagcacuggaggguguaguguuuccuacuuuauggaugaguguacugug

SEQ ID NO: 3595 - RNA, 22 nt, Homo sapiens
ugagaugaagcacuguagcuca

SEQ ID NO: 3596 - RNA, 106 nt, Homo sapiens; identical to SEQ ID NO: 2154

SEQ ID NO: 3597 - RNA, 22 nt, Homo sapiens
ugcaacacaccuauucaaggau

SEQ ID NO: 3598 - RNA, 65 nt, Homo sapiens; identical to SEQ ID NO: 306

SEQ ID NO: 3599 - RNA, 22 nt, Homo sapiens
ucagugcacuacagaacuuugu

SEQ ID NO: 3600 - RNA, 68 nt, Homo sapiens; identical to SEQ ID NO: 2616

SEQ ID NO: 3601 - RNA, 22 nt, Homo sapiens
ucagugcaucacagaacuuugu

SEQ ID NO: 3602 - RNA, 99 nt, Homo sapiens
caagcacgauuagcauuugaggugaaguucuguuauacacucaggcuguggcucucugaaagucagugcaucacagaacuuugucucgaaagcuuucua

SEQ ID NO: 3603 - RNA, 22 nt, Homo sapiens
ucuggcuccgugucuucacucc

SEQ ID NO: 3604 - RNA, 89 nt, Homo sapiens
gccggcgcccgagcucuggcuccgugucuucacucccgugcuuguccgaggagggagggagggacgggggcugugcuggggcagcugga

SEQ ID NO: 3605 - RNA, 22 nt, Homo sapiens
acuagacugaagcuccuugagg

SEQ ID NO: 3606 - RNA, 90 nt, Homo sapiens; identical to SEQ ID NO: 250

SEQ ID NO: 3607 - RNA, 22 nt, Homo sapiens
ucagugcaugacagaacuuggg

SEQ ID NO: 3608 - RNA, 87 nt, Homo sapiens
ugucccccccggcccagguucugugauacacuccgacucgggcucuggagcagucagugcaugacagaacuugggcccggaaggacc

SEQ ID NO: 3609 - RNA, 20 nt, Homo sapiens
uugcauagucacaaaaguga

SEQ ID NO: 3610 - RNA, 90 nt, Homo sapiens
cucacagcugccagugucauuuuugugaucugcagcuaguauucucacuccaguugcauagucacaaaagugaucauuggcagguguggc

SEQ ID NO: 3611 - RNA, 22 nt, Homo sapiens
uagguuauccguguugccuucg

SEQ ID NO: 3612 - RNA, 84 nt, Homo sapiens
gugguacuugaagauagguuauccguguugccuucgcuuuauuugugacgaaucauacacgguugaccuauuuuucaguaccaa

SEQ ID NO: 3613 - RNA, 22 nt, Homo sapiens
aaucauacacgguugaccuauu

SEQ ID NO: 3614 - RNA, 84 nt, Homo sapiens; identical to SEQ ID NO: 3612

SEQ ID NO: 3615 - RNA, 22 nt, Homo sapiens
uuacaacuguuugcagaggaaa

SEQ ID NO: 3616 - RNA, 85 nt, Homo sapiens
gcuaagcacuuacaacuguuugcagaggaaacugagacuuuguaacuaugucucagucucaucugcaaagaaguaagugcuuugc

SEQ ID NO: 3617 - RNA, 22 nt, Homo sapiens
uuaaugcuaaucgugauagggg

SEQ ID NO: 3618 - RNA, 65 nt, Homo sapiens
cuguuaaugcuaaucgugauagggguuuuugccuccaacugacuccuacauauuagcauuaacag

SEQ ID NO: 3619 - RNA, 22 nt, Homo sapiens
agcaccaugcaguccaugggca

SEQ ID NO: 3620 - RNA, 96 nt, Homo sapiens; identical to SEQ ID NO: 2162

SEQ ID NO: 3621 - RNA, 22 nt, Homo sapiens
uagcagcacauaaugguuugug

SEQ ID NO: 3622 - RNA, 83 nt, Homo sapiens
ccuuggaguaaaguagcagcacauaaugguuuguggauuuugaaaaggugcaggccauauugugcugccucaaaaauacaagg

SEQ ID NO: 3623 - RNA, 22 nt, Homo sapiens
uucaaguuaaauggggucuuuc

SEQ ID NO: 3624 - RNA, 111 nt, Homo sapiens
ucuauaugugauagcccauuuaagcaggccccacuuaacuugaaagccaaauaacaagcucgguuucaaguuaaauggggucuuucuucaauaggccaccccauauagaga

SEQ ID NO: 3625 - RNA, 22 nt, Homo sapiens
cagcaccacuugcaggggaggg

SEQ ID NO: 3626 - RNA, 111 nt, Homo sapiens
aacugccuuaccugucuacagcaccacuugcaggggagggggaggaggcaguucuuuaggaaggguagugcaaugcuuccuccucuucugcaagcagugcuggagauucug

SEQ ID NO: 3627 - RNA, 22 nt, Homo sapiens
ugcaagccuugggugugggagg

SEQ ID NO: 3628 - RNA, 111 nt, Homo sapiens; identical to SEQ ID NO: 804

SEQ ID NO: 3629 - RNA, 20 nt, Homo sapiens
acugcagugaaggcacuugu

SEQ ID NO: 3630 - RNA, 84 nt, Homo sapiens
gucagaauaaugucaaagugcuuacagugcagguagugauaugugcaucuacugcagugaaggcacuuguagcauuauggugac

SEQ ID NO: 3631 - RNA, 24 nt, Homo sapiens
caaagugcuuacagugcagguagu

SEQ ID NO: 3632 - RNA, 84 nt, Homo sapiens; identical to SEQ ID NO: 3630

SEQ ID NO: 3633 - RNA, 23 nt, Homo sapiens
aacauucaacgcugucggugagu

SEQ ID NO: 3634 - RNA, 110 nt, Homo sapiens
ugaguuuugagguugcuucagugaacauucaacgcugucggugaguuuggaauuaaaaucaaaaccaucgaccguugauuguacccuauggcuaaccaucaucuacucca

SEQ ID NO: 3635 - RNA, 22 nt, Homo sapiens
accaucgaccguugauuguacc

SEQ ID NO: 3636 - RNA, 110 nt, Homo sapiens; identical to SEQ ID NO: 3634

SEQ ID NO: 3637 - RNA, 22 nt, Homo sapiens
aacauucauugcugucgguggg

SEQ ID NO: 3638 - RNA, 110 nt, Homo sapiens
ccugugcagagauuauuuuuuaaaaggucacaaucaacauucauugcugucgguggguugaacuguguggacaagcucacugaacaaugaaugcaacuguggccccgcuu

SEQ ID NO: 3639 - RNA, 22 nt, Homo sapiens
aacauucaaccugucggugagu

SEQ ID NO: 3640 - RNA, 110 nt, Homo sapiens
cggaaaauuugccaaggguuugggggaacauucaaccugucggugaguuugggcagcucaggcaaaccaucgaccguugaguggacccugaggccuggaauugccauccu

SEQ ID NO: 3641 - RNA, 24 nt, Homo sapiens
aacauucauuguugucgguggguu

SEQ ID NO: 3642 - RNA, 137 nt, Homo sapiens; identical to SEQ ID NO: 1082

SEQ ID NO: 3643 - RNA, 22 nt, Homo sapiens
uuuggcaaugguagaacucaca

SEQ ID NO: 3644 - RNA, 110 nt, Homo sapiens
gagcugcuugccuccccccguuuuuggcaaugguagaacucacacuggugagguaacaggauccggugguucuagacuugccaacuauggggcgaggacucagccggcac

SEQ ID NO: 3645 - RNA, 23 nt, Homo sapiens
uauggcacugguagaauucacug

SEQ ID NO: 3646 - RNA, 110 nt, Homo sapiens; identical to SEQ ID NO: 1694

SEQ ID NO: 3647 - RNA, 22 nt, Homo sapiens
uggacggagaacugauaagggu

SEQ ID NO: 3648 - RNA, 84 nt, Homo sapiens
ccagucacguccccuuaucacuuuuccagcccagcuuugugacuguaaguguuggacggagaacugauaaggguaggugauuga

SEQ ID NO: 3649 - RNA, 18 nt, Homo sapiens
uggagagaaaggcaguuc

SEQ ID NO: 3650 - RNA, 82 nt, Homo sapiens
agggggcgagggauuggagagaaaggcaguuccugaugguccccuccccaggggcuggcuuuccucugguccuucccuccca

SEQ ID NO: 3651 - RNA, 23 nt, Homo sapiens
caaagaauucuccuuuugggcuu

SEQ ID NO: 3652 - RNA, 86 nt, Homo sapiens
ugcuuguaacuuuccaaagaauucuccuuuugggcuuucugguuuuauuuuaagcccaaaggugaauuuuuugggaaguuugagcu

SEQ ID NO: 3653 - RNA, 21 nt, Homo sapiens
ucgugucuuguguugcagccg

SEQ ID NO: 3654 - RNA, 109 nt, Homo sapiens
ggucgggcucaccaugacacagugugagaccucgggcuacaacacaggacccgggcgcugcucugaccccucgugucuuguguugcagccggagggacgcagguccgca

SEQ ID NO: 3655 - RNA, 23 nt, Homo sapiens
gugccuacugagcugauaucagu

SEQ ID NO: 3656 - RNA, 68 nt, Homo sapiens
cuccggugccuacugagcugauaucaguucucauuuuacacacuggcucaguucagcaggaacaggag

SEQ ID NO: 3657 - RNA, 22 nt, Homo sapiens
ugcuggugagggagcccugcug

SEQ ID NO: 3658 - RNA, 111 nt, Homo sapiens
ccuagacugcaaggcuugauuugcuggugagggagcccugcugugagauuuuaaugaaagaucauaguggcccuccaaggccagcaaagagcuaugggcccuggaagaccc

SEQ ID NO: 3659 - RNA, 22 nt, Homo sapiens
uaaggugcaucuagugcagaua

SEQ ID NO: 3660 - RNA, 71 nt, Homo sapiens
uguucuaaggugcaucuagugcagauagugaaguagauuagcaucuacugcccuaagugcuccuucuggca

SEQ ID NO: 3661 - RNA, 22 nt, Homo sapiens
uaaggugcaucuagugcaguua

SEQ ID NO: 3662 - RNA, 71 nt, Homo sapiens
uguguuaaggugcaucuagugcaguuagugaagcagcuuagaaucuacugcccuaaaugccccuucuggca

SEQ ID NO: 3663 - RNA, 21 nt, Homo sapiens
cugaccuaugaauugacagcc

SEQ ID NO: 3664 - RNA, 110 nt, Homo sapiens; identical to SEQ ID NO: 1070

SEQ ID NO: 3665 - RNA, 21 nt, Homo sapiens
aacuggccuacaaagucccag

SEQ ID NO: 3666 - RNA, 88 nt, Homo sapiens; identical to SEQ ID NO: 2982

SEQ ID NO: 3667 - RNA, 24 nt, Homo sapiens
aacuggcccucaaagucccgcuuu

SEQ ID NO: 3668 - RNA, 83 nt, Homo sapiens; identical to SEQ ID NO: 2958

SEQ ID NO: 3669 - RNA, 22 nt, Homo sapiens
uguaacagcaacuccaugugga

SEQ ID NO: 3670 - RNA, 85 nt, Homo sapiens; identical to SEQ ID NO: 1038

SEQ ID NO: 3671 - RNA, 21 nt, Homo sapiens
uagguaguuuccuguuguugg

SEQ ID NO: 3672 - RNA, 84 nt, Homo sapiens; identical to SEQ ID NO: 166

SEQ ID NO: 3673 - RNA, 22 nt, Homo sapiens
uucaccaccuucuccacccagc

SEQ ID NO: 3674 - RNA, 75 nt, Homo sapiens
ggcugugccggguagagagggcagugggagguaagagcucuucacccuucaccaccuucuccacccagcauggcc

SEQ ID NO: 3675 - RNA, 22 nt, Homo sapiens
uauuuauuacaagguccuucuu

SEQ ID NO: 3676 - RNA, 105 nt, Homo sapiens
ccuuuuucugguguguguugcgggggugggggccggugaaagugauuugaugugcagaauauuauuuauuacaagguccuucuuccccguaaaacuuuguccaag

SEQ ID NO: 3677 - RNA, 19 nt, Homo sapiens
gguccagaggggagauagg

SEQ ID NO: 3678 - RNA, 62 nt, Homo sapiens
ucauugguccagaggggagauagguuccugugauuuuuccuucuucucuauagaauaaauga

SEQ ID NO: 3679 - RNA, 22 nt, Homo sapiens
ucuuccagugcuuagcaucugg

SEQ ID NO: 3680 - RNA, 105 nt, Homo sapiens
ccguaaaacaaaauugcuuauggagucugccagcacgccagaugcugcuauuggaagaaauaucuuccagugcuuagcaucuggguuucacgguugccagaaaaa

SEQ ID NO: 3681 - RNA, 23 nt, Homo sapiens
cccaguguucagacuaccuguuc

SEQ ID NO: 3682 - RNA, 110 nt, Homo sapiens
aggaagcuucuggagauccugcuccgucgccccaguguucagacuaccuguucaggacaaugccguuguacaguagucugcacauugguuagacugggcaagggagagca

SEQ ID NO: 3683 - RNA, 23 nt, Homo sapiens
cccaguguuuagacuaucuguuc

SEQ ID NO: 3684 - RNA, 110 nt, Homo sapiens
ccagaggacaccuccacuccgucuacccaguguuuagacuaucuguucaggacucccaaauuguacaguagucugcacauugguuaggcugggcuggguuagacccucgg

SEQ ID NO: 3685 - RNA, 23 nt, Homo sapiens
ugugcaaaucuaugcaaaacuga

SEQ ID NO: 3686 - RNA, 82 nt, Homo sapiens
gcaguccucuguuaguuuugcauaguugcacuacaagaagaauguaguugugcaaaucuaugcaaaacugaugguggccugc

SEQ ID NO: 3687 - RNA, 23 nt, Homo sapiens
ugugcaaauccaugcaaaacuga

SEQ ID NO: 3688 - RNA, 96 nt, Homo sapiens
acauugcuacuuacaauuaguuuugcagguuugcauuucagcguauauauguauauguggcugugcaaauccaugcaaaacugauugugauaaugu

SEQ ID NO: 3689 - RNA, 22 nt, Homo sapiens
uaacacugucugguaacgaugu

SEQ ID NO: 3690 - RNA, 90 nt, Homo sapiens; identical to SEQ ID NO: 554

SEQ ID NO: 3691 - RNA, 22 nt, Homo sapiens
caucuuaccggacagugcugga

SEQ ID NO: 3692 - RNA, 90 nt, Homo sapiens; identical to SEQ ID NO: 554

SEQ ID NO: 3693 - RNA, 23 nt, Homo sapiens
uaauacugccugguaaugaugac

SEQ ID NO: 3694 - RNA, 95 nt, Homo sapiens; identical to SEQ ID NO: 1042

SEQ ID NO: 3695 - RNA, 22 nt, Homo sapiens
uaauacugccggguaaugaugg

SEQ ID NO: 3696 - RNA, 68 nt, Homo sapiens
cccucgucuuacccagcaguguuugggugcgguugggagucucuaauacugccggguaaugauggagg

SEQ ID NO: 3697 - RNA, 22 nt, Homo sapiens
agagguauagggcaugggaaaa

SEQ ID NO: 3698 - RNA, 110 nt, Homo sapiens
cgccucagagccgcccgccguuccuuuuuccuaugcauauacuucuuugaggaucuggccuaaagagguauagggcaugggaaaacggggcggucggguccuccccagcg

SEQ ID NO: 3699 - RNA, 22 nt, Homo sapiens
gaaacauucgcggugcacuucu

SEQ ID NO: 3700 - RNA, 105 nt, Homo sapiens
acggugcugacgugcgguacuuaaugagaaguugcccguguuuuuuucgcuuuauuugugacgaaacauucgcggugcacuucuuuuucaguauccuauucugcc

SEQ ID NO: 3701 - RNA, 22 nt, Homo sapiens
gugaaauguuuaggaccacuag

SEQ ID NO: 3702 - RNA, 110 nt, Homo sapiens; identical to SEQ ID NO: 1066

SEQ ID NO: 3703 - RNA, 22 nt, Homo sapiens
ggaggcaaagccgggcucuuaa

SEQ ID NO: 3704 - RNA, 105 nt, Homo sapiens
cgcaugcgcuauauuggaccgcagcgcugagagcuuuuguguuuaaugaccuucagcuaccgggaggcaaagccgggcucuuaaaggagccgcgcuccaauuguc

SEQ ID NO: 3705 - RNA, 22 nt, Homo sapiens
uucccuuugucauccuaugccu

SEQ ID NO: 3706 - RNA, 110 nt, Homo sapiens; identical to SEQ ID NO: 1580

SEQ ID NO: 3707 - RNA, 22 nt, Homo sapiens
uccuucauuccaccggagucug

SEQ ID NO: 3708 - RNA, 110 nt, Homo sapiens; identical to SEQ ID NO: 1450

SEQ ID NO: 3709 - RNA, 22 nt, Homo sapiens
uggaauguaaggaagugugugg

SEQ ID NO: 3710 - RNA, 86 nt, Homo sapiens
ugcuucccgaggccacaugcuucuuuauauccccauauggauuacuuugcuauggaauguaaggaagugugugguuucggcaagug

SEQ ID NO: 3711 - RNA, 22 nt, Homo sapiens
uuaaagcugugugugggaggca

SEQ ID NO: 3712 - RNA, 111 nt, Homo sapiens; identical to SEQ ID NO: 2812

SEQ ID NO: 3713 - RNA, 22 nt, Homo sapiens
acuuugugcuggugccggggaa

SEQ ID NO: 3714 - RNA, 105 nt, Homo sapiens
ccgggcggggagggggggucacggcggcggcgugggguucgcugugugacacaauuacaacaacuuugugcuggugccggggaaguuugugucuccaacgaaucc

SEQ ID NO: 3715 - RNA, 22 nt, Homo sapiens
uagcuuaucagacugauguuga

SEQ ID NO: 3716 - RNA, 72 nt, Homo sapiens
ugucggguagcuuaucagacugauguugacuguugaaucucauggcaacaccagucgaugggcugucugaca

SEQ ID NO: 3717 - RNA, 22 nt, Homo sapiens
cugugcgugugacagcggcuga

SEQ ID NO: 3718 - RNA, 110 nt, Homo sapiens
acccggcagugccuccaggcgcagggcagccccugcccaccgcacacugcgcugccccagacccacugugcgugugacagcggcugaucugugccugggcagcgcgaccc

SEQ ID NO: 3719 - RNA, 22 nt, Homo sapiens
uucccuuugucauccuucgccu

SEQ ID NO: 3720 - RNA, 110 nt, Homo sapiens; identical to SEQ ID NO: 2870

SEQ ID NO: 3721 - RNA, 21 nt, Homo sapiens
uaacagucuccagucacggcc

SEQ ID NO: 3722 - RNA, 110 nt, Homo sapiens; identical to SEQ ID NO: 1046

SEQ ID NO: 3723 - RNA, 21 nt, Homo sapiens
acagcaggcacagacaggcag

SEQ ID NO: 3724 - RNA, 110 nt, Homo sapiens; identical to SEQ ID NO: 194

SEQ ID NO: 3725 - RNA, 21 nt, Homo sapiens
augaccuaugaauugacagac

SEQ ID NO: 3726 - RNA, 110 nt, Homo sapiens
aucauucagaaaugguauacaggaaaaugaccuaugaauugacagacaauauagcugaguuugucugucauuucuuuaggccaauauucuguaugacugugcuacuucaa

SEQ ID NO: 3727 - RNA, 21 nt, Homo sapiens
uaaucucagcuggcaacugug

SEQ ID NO: 3728 - RNA, 110 nt, Homo sapiens; identical to SEQ ID NO: 2160

SEQ ID NO: 3729 - RNA, 24 nt, Homo sapiens
uacugcaucaggaacugauuggau

SEQ ID NO: 3730 - RNA, 110 nt, Homo sapiens; identical to SEQ ID NO: 2014

SEQ ID NO: 3731 - RNA, 21 nt, Homo sapiens
uugugcuugaucuaaccaugu

SEQ ID NO: 3732 - RNA, 110 nt, Homo sapiens
gaccagucgcugcggggcuuuccuuugugcuugaucuaaccaugugguggaacgauggaaacggaacaugguucugucaagcaccgcggaaagcaccgugcucuccugca

SEQ ID NO: 3733 - RNA, 22 nt, Homo sapiens
ugcuggugggcauaggugccag

SEQ ID NO: 3734 - RNA, 111 nt, Homo sapiens
gcagcugacacacaugcccaucugccaugcuggcacagugcccccagcaaggggagcucugcuuccugcuggugggcauaggugccaggugguugcacaugccugcagagg

SEQ ID NO: 3735 - RNA, 22 nt, Homo sapiens
aagcugccaguugaagaacugu

SEQ ID NO: 3736 - RNA, 85 nt, Homo sapiens
ggcugagccgcaguaguucuucaguggcaagcuuuauguccugacccagcuaaagcugccaguugaagaacuguugcccucugcc

SEQ ID NO: 3737 - RNA, 23 nt, Homo sapiens
agcuacauugucugcuggguuuc

SEQ ID NO: 3738 - RNA, 110 nt, Homo sapiens; identical to SEQ ID NO: 3126

SEQ ID NO: 3739 - RNA, 24 nt, Homo sapiens
agcuacaucuggcuacugggucuc

SEQ ID NO: 3740 - RNA, 110 nt, Homo sapiens
gcugcuggaagguguagguacccucaauggcucaguagccaguguagauccugucuuucguaaucagcagcuacaucuggcuacugggucucugauggcaucuucuagcu

SEQ ID NO: 3741 - RNA, 21 nt, Homo sapiens
ugucaguuugucaaauacccc

SEQ ID NO: 3742 - RNA, 110 nt, Homo sapiens
ccuggccuccugcagugccacgcuccguguauuugacaagcugaguuggacacuccaugugguagagugucaguuugucaaauaccccaagugcggcacaugcuuaccag

SEQ ID NO: 3743 - RNA, 22 nt, Homo sapiens
uaagugccaguggcagcaggug

SEQ ID NO: 3744 - RNA, 105 nt, Homo sapiens; identical to SEQ ID NO: 1680

SEQ ID NO: 3745 - RNA, 23 nt, Homo sapiens
caagucacuagugguuccguuua

SEQ ID NO: 3746 - RNA, 81 nt, Homo sapiens; identical to SEQ ID NO: 826

SEQ ID NO: 3747 - RNA, 21 nt, Homo sapiens
aucacauugccagggauuacc

SEQ ID NO: 3748 - RNA, 97 nt, Homo sapiens; identical to SEQ ID NO: 2790

SEQ ID NO: 3749 - RNA, 22 nt, Homo sapiens
uggcucaguucagcaggaacag

SEQ ID NO: 3750 - RNA, 68 nt, Homo sapiens; identical to SEQ ID NO: 3656

SEQ ID NO: 3751 - RNA, 22 nt, Homo sapiens
uauaauacaaccugcuaagugu

SEQ ID NO: 3752 - RNA, 105 nt, Homo sapiens
agaaauccuacucggauggauauaauacaaccugcuaaguguccuagcacuuagcagguuguauuaucauuguccgugucuauggcucucgucuaccagacuuua

SEQ ID NO: 3753 - RNA, 22 nt, Homo sapiens
uucaaguaauucaggauagguu

SEQ ID NO: 3754 - RNA, 77 nt, Homo sapiens
ccgggacccaguucaaguaauucaggauagguugugugcuguccagccuguucuccauuacuuggcucggggaccgg

SEQ ID NO: 3755 - RNA, 21 nt, Homo sapiens
uucacaguggcuaaguuccgc

SEQ ID NO: 3756 - RNA, 78 nt, Homo sapiens; identical to SEQ ID NO: 1050

SEQ ID NO: 3757 - RNA, 21 nt, Homo sapiens
uucacaguggcuaaguucugc

SEQ ID NO: 3758 - RNA, 97 nt, Homo sapiens; identical to SEQ ID NO: 2624

SEQ ID NO: 3759 - RNA, 22 nt, Homo sapiens
aaggagcucacagucuauugag

SEQ ID NO: 3760 - RNA, 86 nt, Homo sapiens; identical to SEQ ID NO: 872

SEQ ID NO: 3761 - RNA, 21 nt, Homo sapiens
agggcccccccucaauccugu

SEQ ID NO: 3762 - RNA, 80 nt, Homo sapiens; identical to SEQ ID NO: 2470

SEQ ID NO: 3763 - RNA, 22 nt, Homo sapiens
uaugugggaugguaaaccgcuu

SEQ ID NO: 3764 - RNA, 63 nt, Homo sapiens
aagaaaugguuuaccgucccacauacauuuugaauauguaugugggaugguaaaccgcuucuu

SEQ ID NO: 3765 - RNA, 22 nt, Homo sapiens
ugguuuaccgucccacauacau

SEQ ID NO: 3766 - RNA, 63 nt, Homo sapiens; identical to SEQ ID NO: 3764

SEQ ID NO: 3767 - RNA, 20 nt, Homo sapiens
uagcaccauuugaaaucggu

SEQ ID NO: 3768 - RNA, 88 nt, Homo sapiens; identical to SEQ ID NO: 858

SEQ ID NO: 3769 - RNA, 22 nt, Homo sapiens
cuuucagucggauguuugcagc

SEQ ID NO: 3770 - RNA, 71 nt, Homo sapiens
gcgacuguaaacauccucgacuggaagcugugaagccacagaugggcuuucagucggauguuugcagcugc

SEQ ID NO: 3771 - RNA, 22 nt, Homo sapiens
uguaaacauccucgacuggaag

SEQ ID NO: 3772 - RNA, 71 nt, Homo sapiens; identical to SEQ ID NO: 3770

SEQ ID NO: 3773 - RNA, 22 nt, Homo sapiens
uguaaacauccuacacucagcu

SEQ ID NO: 3774 - RNA, 88 nt, Homo sapiens; identical to SEQ ID NO: 2984

SEQ ID NO: 3775 - RNA, 23 nt, Homo sapiens
uguaaacauccuacacucucagc

SEQ ID NO: 3776 - RNA, 89 nt, Homo sapiens; identical to SEQ ID NO: 2738

SEQ ID NO: 3777 - RNA, 22 nt, Homo sapiens
uguaaacauccccgacuggaag

SEQ ID NO: 3778 - RNA, 70 nt, Homo sapiens
guuguuguaaacauccccgacuggaagcuguaagacacagcuaagcuuucagucagauguuugcugcuac

SEQ ID NO: 3779 - RNA, 22 nt, Homo sapiens
cuuucagucggauguuuacagc

SEQ ID NO: 3780 - RNA, 92 nt, Homo sapiens
gggcagucuuugcuacuguaaacauccuugacuggaagcuguaagguguucagaggagcuuucagucggauguuuacagcggcaggcugcca

SEQ ID NO: 3781 - RNA, 20 nt, Homo sapiens
uguaaacauccuugacugga

SEQ ID NO: 3782 - RNA, 92 nt, Homo sapiens; identical to SEQ ID NO: 3780

SEQ ID NO: 3783 - RNA, 21 nt, Homo sapiens
ggcaagaugcuggcauagcug

SEQ ID NO: 3784 - RNA, 71 nt, Homo sapiens; identical to SEQ ID NO: 3122

SEQ ID NO: 3785 - RNA, 23 nt, Homo sapiens
aaaagcuggguugagagggcgaa

SEQ ID NO: 3786 - RNA, 82 nt, Homo sapiens
gcuucgcuccccuccgccuucucuucccgguucuucccggagucgggaaaagcuggguugagagggcgaaaaaggaugaggu

SEQ ID NO: 3787 - RNA, 22 nt, Homo sapiens
gcacauuacacggucgaccucu

SEQ ID NO: 3788 - RNA, 86 nt, Homo sapiens
uugguacuuggagagaggugguccguggcgcguucgcuuuauuuauggcgcacauuacacggucgaccucuuugcaguaucuaauc

SEQ ID NO: 3789 - RNA, 22 nt, Homo sapiens
ccacugccccaggugcugcugg

SEQ ID NO: 3790 - RNA, 83 nt, Homo sapiens
cugacuaugccuccccgcauccccuagggcauugguguaaagcuggagacccacugccccaggugcugcuggggguuguaguc

SEQ ID NO: 3791 - RNA, 23 nt, Homo sapiens
cgcauccccuagggcauuggugu

SEQ ID NO: 3792 - RNA, 83 nt, Homo sapiens; identical to SEQ ID NO: 3790

SEQ ID NO: 3793 - RNA, 22 nt, Homo sapiens
cuggcccucucugcccuuccgu

SEQ ID NO: 3794 - RNA, 75 nt, Homo sapiens
uggagugggggggcaggaggggcucagggagaaagugcauacagccccuggcccucucugcccuuccguccccug

SEQ ID NO: 3795 - RNA, 22 nt, Homo sapiens
aacacaccugguuaaccucuuu

SEQ ID NO: 3796 - RNA, 80 nt, Homo sapiens
gguaccugaagagagguuuucuggguuucuguuucuuuaaugaggacgaaacacaccugguuaaccucuuuuccaguauc

SEQ ID NO: 3797 - RNA, 23 nt, Homo sapiens
gcaaagcacacggccugcagaga

SEQ ID NO: 3798 - RNA, 94 nt, Homo sapiens
cuuuggcgaucacugccucucugggccugugucuuaggcucugcaagaucaaccgagcaaagcacacggccugcagagaggcagcgcucugccc

SEQ ID NO: 3799 - RNA, 21 nt, Homo sapiens
gccccugggccuauccuagaa

SEQ ID NO: 3800 - RNA, 94 nt, Homo sapiens
gaguuugguuuuguuuggguuuguucuagguauggucccagggaucccagaucaaaccaggccccugggccuauccuagaaccaaccuaagcuc

SEQ ID NO: 3801 - RNA, 23 nt, Homo sapiens
ucaagagcaauaacgaaaaaugu

SEQ ID NO: 3802 - RNA, 94 nt, Homo sapiens
uguuuugagcgggggucaagagcaauaacgaaaaauguuugucauaaaccguuuuucauuauugcuccugaccuccucucauuugcuauauuca

SEQ ID NO: 3803 - RNA, 23 nt, Homo sapiens
uccagcaucagugauuuuguuga

SEQ ID NO: 3804 - RNA, 67 nt, Homo sapiens; identical to SEQ ID NO: 192

SEQ ID NO: 3805 - RNA, 21 nt, Homo sapiens
ucccuguccuccaggagcuca

SEQ ID NO: 3806 - RNA, 94 nt, Homo sapiens
cggggcggccgcucucccuguccuccaggagcucacgugugccugccugugagcgccucgacgacagagccggcgccugccccagugucugcgc

SEQ ID NO: 3807 - RNA, 23 nt, Homo sapiens
uccgucucaguuacuuuauagcc

SEQ ID NO: 3808 - RNA, 95 nt, Homo sapiens; identical to SEQ ID NO: 1062

SEQ ID NO: 3809 - RNA, 21 nt, Homo sapiens
ugcugacuccuaguccagggc

SEQ ID NO: 3810 - RNA, 98 nt, Homo sapiens
acccaaacccuaggucugcugacuccuaguccagggcucgugauggcuggugggcccugaacgaggggucuggaggccuggguuugaauaucgacagc

SEQ ID NO: 3811 - RNA, 23 nt, Homo sapiens
ugucugcccgcaugccugccucu

SEQ ID NO: 3812 - RNA, 95 nt, Homo sapiens
ggucucuguguugggcgucugucugcccgcaugccugccucucuguugcucugaaggaggcaggggcugggccugcagcugccugggcagagcgg

SEQ ID NO: 3813 - RNA, 23 nt, Homo sapiens
uggcagugucuuagcugguuguu

SEQ ID NO: 3814 - RNA, 110 nt, Homo sapiens; identical to SEQ ID NO: 1452

SEQ ID NO: 3815 - RNA, 23 nt, Homo sapiens
uaggcagugucauuagcugauug

SEQ ID NO: 3816 - RNA, 84 nt, Homo sapiens; identical to SEQ ID NO: 846

SEQ ID NO: 3817 - RNA, 23 nt, Homo sapiens
aggcaguguaguuagcugauugc

SEQ ID NO: 3818 - RNA, 77 nt, Homo sapiens; identical to SEQ ID NO: 1882

SEQ ID NO: 3819 - RNA, 22 nt, Homo sapiens
uuaucagaaucuccagggguac

SEQ ID NO: 3820 - RNA, 72 nt, Homo sapiens
ggagcuuaucagaaucuccagggguacuuuauaauuucaaaaagucccccaggugugauucugauuugcuuc

SEQ ID NO: 3821 - RNA, 24 nt, Homo sapiens
aauccuuggaaccuaggugugagu

SEQ ID NO: 3822 - RNA, 65 nt, Homo sapiens; identical to SEQ ID NO: 306

SEQ ID NO: 3823 - RNA, 22 nt, Homo sapiens
aauugcacgguauccaucugua

SEQ ID NO: 3824 - RNA, 75 nt, Homo sapiens
uguugucggguggaucacgaugcaauuuugaugaguaucauaggagaaaaauugcacgguauccaucuguaaacc

SEQ ID NO: 3825 - RNA, 22 nt, Homo sapiens
uaaugccccuaaaaauccuuau

SEQ ID NO: 3826 - RNA, 111 nt, Homo sapiens; identical to SEQ ID NO: 1028

SEQ ID NO: 3827 - RNA, 22 nt, Homo sapiens
acauagaggaaauuccacguuu

SEQ ID NO: 3828 - RNA, 66 nt, Homo sapiens
aaaagguggauauuccuucuauguuuauguuauuuaugguuaaacauagaggaaauuccacguuuu

SEQ ID NO: 3829 - RNA, 21 nt, Homo sapiens
aauaauacaugguugaucuuu

SEQ ID NO: 3830 - RNA, 70 nt, Homo sapiens
uugaagggagaucgaccguguuauauucgcuuuauugacuucgaauaauacaugguugaucuuuucucag

SEQ ID NO: 3831 - RNA, 22 nt, Homo sapiens
agaucgaccguguuauauucgc

SEQ ID NO: 3832 - RNA, 70 nt, Homo sapiens; identical to SEQ ID NO: 3830

SEQ ID NO: 3833 - RNA, 21 nt, Homo sapiens
gccugcugggguggaaccugg

SEQ ID NO: 3834 - RNA, 75 nt, Homo sapiens
agacagagaagccaggucacgucucugcaguuacacagcucacgagugccugcugggguggaaccuggucugucu

SEQ ID NO: 3835 - RNA, 21 nt, Homo sapiens
gugccgccaucuuuugagugu

SEQ ID NO: 3836 - RNA, 67 nt, Homo sapiens; identical to SEQ ID NO: 2868

SEQ ID NO: 3837 - RNA, 23 nt, Homo sapiens
aaagugcugcgacauuugagcgu

SEQ ID NO: 3838 - RNA, 67 nt, Homo sapiens
gugggccucaaauguggagcacuauucugauguccaaguggaaagugcugcgacauuugagcgucac

SEQ ID NO: 3839 - RNA, 23 nt, Homo sapiens
gaagugcuucgauuuuggggugu

SEQ ID NO: 3840 - RNA, 69 nt, Homo sapiens
gggauacucaaaaugggggcgcuuuccuuuuugucuguacugggaagugcuucgauuuugggguguccc

SEQ ID NO: 3841 - RNA, 22 nt, Homo sapiens
acucaaaaugggggcgcuuucc

SEQ ID NO: 3842 - RNA, 69 nt, Homo sapiens; identical to SEQ ID NO: 3840

SEQ ID NO: 3843 - RNA, 22 nt, Homo sapiens
uuauaauacaaccugauaagug

SEQ ID NO: 3844 - RNA, 72 nt, Homo sapiens
uacaucggccauuauaauacaaccugauaaguguuauagcacuuaucagauuguauuguaauugucugugua

SEQ ID NO: 3845 - RNA, 22 nt, Homo sapiens
uuuguucguucggcucgcguga

SEQ ID NO: 3846 - RNA, 64 nt, Homo sapiens
ccccgcgacgagccccucgcacaaaccggaccugagcguuuuguucguucggcucgcgugaggc

SEQ ID NO: 3847 - RNA, 21 nt, Homo sapiens
aucauagaggaaaauccacgu

SEQ ID NO: 3848 - RNA, 80 nt, Homo sapiens
gguauuuaaaagguagauuuuccuucuaugguuacguguuugaugguuaaucauagaggaaaauccacguuuucaguauc

SEQ ID NO: 3849 - RNA, 21 nt, Homo sapiens
gguagauucuccuucuaugag

SEQ ID NO: 3850 - RNA, 68 nt, Homo sapiens
uaaaagguagauucuccuucuaugaguacauuauuuaugauuaaucauagaggaaaauccacguuuuc

SEQ ID NO: 3851 - RNA, 22 nt, Homo sapiens
aucauagaggaaaauccauguu

SEQ ID NO: 3852 - RNA, 100 nt, Homo sapiens
caguccuucuuugguauuuaaaacguggauauuccuucuauguuuacgugauuccugguuaaucauagaggaaaauccauguuuucaguaucaaaugcug

SEQ ID NO: 3853 - RNA, 22 nt, Homo sapiens
aucacacaaaggcaacuuuugu

SEQ ID NO: 3854 - RNA, 69 nt, Homo sapiens; identical to SEQ ID NO: 2626

SEQ ID NO: 3855 - RNA, 22 nt, Homo sapiens
cuccugacuccagguccugugu

SEQ ID NO: 3856 - RNA, 66 nt, Homo sapiens
agggcuccugacuccagguccuguguguuaccuagaaauagcacuggacuuggagucagaaggccu

SEQ ID NO: 3857 - RNA, 19 nt, Homo sapiens
ugguagacuauggaacgua

SEQ ID NO: 3858 - RNA, 67 nt, Homo sapiens; identical to SEQ ID NO: 2158

SEQ ID NO: 3859 - RNA, 22 nt, Homo sapiens
uauguaauaugguccacaucuu

SEQ ID NO: 3860 - RNA, 61 nt, Homo sapiens
aagaugguugaccauagaacaugcgcuaucucugugucguauguaauaugguccacaucuu

SEQ ID NO: 3861 - RNA, 22 nt, Homo sapiens
uauacaagggcaagcucucugu

SEQ ID NO: 3862 - RNA, 75 nt, Homo sapiens; identical to SEQ ID NO: 1578

SEQ ID NO: 3863 - RNA, 22 nt, Homo sapiens
gaaguuguucgugguggauucg

SEQ ID NO: 3864 - RNA, 76 nt, Homo sapiens; identical to SEQ ID NO: 836

SEQ ID NO: 3865 - RNA, 22 nt, Homo sapiens
agaucagaaggugauuguggcu

SEQ ID NO: 3866 - RNA, 73 nt, Homo sapiens
cuccucagaucagaaggugauuguggcuuuggguggauauuaaucagccacagcacugccuggucagaaagag

SEQ ID NO: 3867 - RNA, 23 nt, Homo sapiens
cgaauguugcucggugaaccccu

SEQ ID NO: 3868 - RNA, 79 nt, Homo sapiens; identical to SEQ ID NO: 2846

SEQ ID NO: 3869 - RNA, 22 nt, Homo sapiens
agguuacccgagcaacuuugca

SEQ ID NO: 3870 - RNA, 79 nt, Homo sapiens; identical to SEQ ID NO: 2846

SEQ ID NO: 3871 - RNA, 21 nt, Homo sapiens
aauauaacacagauggccugu

SEQ ID NO: 3872 - RNA, 80 nt, Homo sapiens
gguaccugagaagagguugucugugaugaguucgcuuuuauuaaugacgaauauaacacagauggccuguuuucaguacc

SEQ ID NO: 3873 - RNA, 21 nt, Homo sapiens
uaguagaccguauagcguacg

SEQ ID NO: 3874 - RNA, 96 nt, Homo sapiens
ugguacuuggagagauaguagaccguauagcguacgcuuuaucugugacguauguaacacgguccacuaacccucaguaucaaauccauccccgag

SEQ ID NO: 3875 - RNA, 23 nt, Homo sapiens
aucaacagacauuaauugggcgc

SEQ ID NO: 3876 - RNA, 85 nt, Homo sapiens
gcacauuguaggccucauuaaauguuuguugaaugaaaaaaugaaucaucaacagacauuaauugggcgccugcucugugaucuc

SEQ ID NO: 3877 - RNA, 22 nt, Homo sapiens
cuggacuuagggucagaaggcc

SEQ ID NO: 3878 - RNA, 90 nt, Homo sapiens
gagagaagcacuggacuuagggucagaaggccugagucucucugcugcagaugggcucucugucccugagccaagcuuuguccucccugg

SEQ ID NO: 3879 - RNA, 22 nt, Homo sapiens
cuggacuuggagucagaaggcc

SEQ ID NO: 3880 - RNA, 66 nt, Homo sapiens; identical to SEQ ID NO: 3856

SEQ ID NO: 3881 - RNA, 22 nt, Homo sapiens
agcucggucugaggccccucag

SEQ ID NO: 3882 - RNA, 94 nt, Homo sapiens
auaaaggaaguuaggcugaggggcagagagcgagacuuuucuauuuuccaaaagcucggucugaggccccucagucuugcuuccuaacccgcgc

SEQ ID NO: 3883 - RNA, 22 nt, Homo sapiens
cagcagcaauucauguuuugaa

SEQ ID NO: 3884 - RNA, 98 nt, Homo sapiens; identical to SEQ ID NO: 3282

SEQ ID NO: 3885 - RNA, 21 nt, Homo sapiens
aucgggaaugucguguccgcc

SEQ ID NO: 3886 - RNA, 87 nt, Homo sapiens
gaaagcgcuuuggaaugacacgaucacucccguugagugggcacccgagaagccaucgggaaugucguguccgcccagugcucuuuc

SEQ ID NO: 3887 - RNA, 23 nt, Homo sapiens
aaugacacgaucacucccguuga

SEQ ID NO: 3888 - RNA, 87 nt, Homo sapiens; identical to SEQ ID NO: 3886

SEQ ID NO: 3889 - RNA, 22 nt, Homo sapiens
uaauacugucugguaaaaccgu

SEQ ID NO: 3890 - RNA, 83 nt, Homo sapiens
cgccggccgaugggcgucuuaccagacaugguuagaccuggcccucugucuaauacugucugguaaaaccguccauccgcugc

SEQ ID NO: 3891 - RNA, 23 nt, Homo sapiens
ucuuggaguaggucauugggugg

SEQ ID NO: 3892 - RNA, 94 nt, Homo sapiens
ugacuccuccaggucuuggaguaggucauuggguggauccucuauuuccuuacgugggccacuggauggcuccuccaugucuuggaguagauca

SEQ ID NO: 3893 - RNA, 22 nt, Homo sapiens
aucaugaugggcuccucggugu

SEQ ID NO: 3894 - RNA, 93 nt, Homo sapiens
ccggggagaaguacggugagccugucauuauucagagaggcuagauccucuguguugagaaggaucaugaugggcuccucgguguucuccagg

SEQ ID NO: 3895 - RNA, 22 nt, Homo sapiens
uggcaguguauuguuagcuggu

SEQ ID NO: 3896 - RNA, 91 nt, Homo sapiens
cugugugugaugagcuggcaguguauuguuagcugguugaauaugugaauggcaucggcuaacaugcaacugcugucuuauugcauauaca

SEQ ID NO: 3897 - RNA, 22 nt, Homo sapiens
aggcaguguauuguuagcuggc

SEQ ID NO: 3898 - RNA, 97 nt, Homo sapiens
ugaccugaaucagguaggcaguguauuguuagcuggcugcuugggucaagucagcagccacaacuacccugccacuugcuucuggauaaauucuucu

SEQ ID NO: 3899 - RNA, 22 nt, Homo sapiens
uuuuugcgauguguuccuaaua

SEQ ID NO: 3900 - RNA, 100 nt, Homo sapiens; identical to SEQ ID NO: 3278

SEQ ID NO: 3901 - RNA, 22 nt, Homo sapiens
uguuugcagaggaaacugagac

SEQ ID NO: 3902 - RNA, 85 nt, Homo sapiens; identical to SEQ ID NO: 3616

SEQ ID NO: 3903 - RNA, 21 nt, Homo sapiens
ucagucucaucugcaaagaag

SEQ ID NO: 3904 - RNA, 85 nt, Homo sapiens; identical to SEQ ID NO: 3616

SEQ ID NO: 3905 - RNA, 25 nt, Homo sapiens
uagugcaauauugcuuauaggguuu

SEQ ID NO: 3906 - RNA, 115 nt, Homo sapiens
ucuguuuaucaccagauccuagaacccuaucaauauugucucugcuguguaaauaguucugaguagugcaauauugcuuauaggguuuugguguuuggaaagaacaaugggcagg

SEQ ID NO: 3907 - RNA, 22 nt, Homo sapiens
uaugugccuuuggacuacaucg

SEQ ID NO: 3908 - RNA, 96 nt, Homo sapiens; identical to SEQ ID NO: 2162

SEQ ID NO: 3909 - RNA, 23 nt, Homo sapiens
ucacuccucuccucccgucuucu

SEQ ID NO: 3910 - RNA, 76 nt, Homo sapiens
gagggggaagacgggaggaaagaagggagugguuccaucacgccuccucacuccucuccucccgucuucuccucuc

SEQ ID NO: 3911 - RNA, 22 nt, Homo sapiens
aagacgggaggaaagaagggag

SEQ ID NO: 3912 - RNA, 76 nt, Homo sapiens; identical to SEQ ID NO: 3910

SEQ ID NO: 3913 - RNA, 22 nt, Homo sapiens
gucauacacggcucuccucucu

SEQ ID NO: 3914 - RNA, 73 nt, Homo sapiens
acuuggagagaggcuggccgugaugaauucgauucaucaaagcgagucauacacggcucuccucucuuuuagu

SEQ ID NO: 3915 - RNA, 22 nt, Homo sapiens
agaggcuggccgugaugaauuc

SEQ ID NO: 3916 - RNA, 73 nt, Homo sapiens; identical to SEQ ID NO: 3914

SEQ ID NO: 3917 - RNA, 22 nt, Homo sapiens
uccuguacugagcugccccgag

SEQ ID NO: 3918 - RNA, 68 nt, Homo sapiens
guauccuguacugagcugccccgagcugggcagcaugaagggccucggggcagcucaguacaggaugc

SEQ ID NO: 3919 - RNA, 22 nt, Homo sapiens
aaucauacagggacauccaguu

SEQ ID NO: 3920 - RNA, 80 nt, Homo sapiens; identical to SEQ ID NO: 2562

SEQ ID NO: 3921 - RNA, 22 nt, Homo sapiens
aaucguacagggucauccacuu

SEQ ID NO: 3922 - RNA, 84 nt, Homo sapiens
uugguacuuggagagugguuaucccuguccuguucguuuugcucaugucgaaucguacagggucauccacuuuuucaguaucaa

SEQ ID NO: 3923 - RNA, 23 nt, Homo sapiens
agugacaucacauauacggcagc

SEQ ID NO: 3924 - RNA, 84 nt, Homo sapiens
guggcagcuugguggucguaugugugacgccauuuacuugaaccuuuaggagugacaucacauauacggcagcuaaacugcuac

SEQ ID NO: 3925 - RNA, 23 nt, Homo sapiens
aguggggaacccuuccaugagga

SEQ ID NO: 3926 - RNA, 84 nt, Homo sapiens
uugacuuagcuggguaguggggaacccuuccaugaggaguagaacacuccuuaugcaagauucccuucuaccuggcuggguugg

SEQ ID NO: 3927 - RNA, 21 nt, Homo sapiens
ugaaggucuacugugugccag

SEQ ID NO: 3928 - RNA, 89 nt, Homo sapiens
cuggccuccagggcuuuguacaugguaggcuuucauucauucguuugcacauucggugaaggucuacugugugccaggcccugugccag

SEQ ID NO: 3929 - RNA, 22 nt, Homo sapiens
uuguacaugguaggcuuucauu

SEQ ID NO: 3930 - RNA, 89 nt, Homo sapiens; identical to SEQ ID NO: 3928

SEQ ID NO: 3931 - RNA, 24 nt, Homo sapiens
ugaaacauacacgggaaaccucuu

SEQ ID NO: 3932 - RNA, 81 nt, Homo sapiens
gauacucgaaggagagguuguccguguugucuucucuuuauuuaugaugaaacauacacgggaaaccucuuuuuuaguauc

SEQ ID NO: 3933 - RNA, 23 nt, Homo sapiens
aaacaaacauggugcacuucuuu

SEQ ID NO: 3934 - RNA, 82 nt, Homo sapiens
ugguaccugaaaagaaguugcccauguuauuuucgcuuuauaugugacgaaacaaacauggugcacuucuuuuucgguauca

SEQ ID NO: 3935 - RNA, 17 nt, Homo sapiens
auuacauggccaaucuc

SEQ ID NO: 3936 - RNA, 102 nt, Homo sapiens; identical to SEQ ID NO: 106

SEQ ID NO: 3937 - RNA, 21 nt, Homo sapiens
cagcagcacacugugguuugu

SEQ ID NO: 3938 - RNA, 112 nt, Homo sapiens
ccaccccgguccugcucccgccccagcagcacacugugguuuguacggcacuguggccacguccaaaccacacugugguguuagagcgagggugggggaggcaccgccgagg

SEQ ID NO: 3939 - RNA, 23 nt, Homo sapiens
uuucaagccagggggcguuuuuc

SEQ ID NO: 3940 - RNA, 124 nt, Homo sapiens
aacccuccuugggaagugaagcucaggcugugauuucaagccagggggcguuuuucuauaacuggaugaaaagcaccuccagagcuugaagcucacaguuugagagcaaucgucuaaggaaguu

SEQ ID NO: 3941 - RNA, 23 nt, Homo sapiens
uuaagacuugcagugauguuuaa

SEQ ID NO: 3942 - RNA, 122 nt, Homo sapiens
gcccuguccccugugccuugggcgggcggcuguuaagacuugcagugauguuuaacuccucuccacgugaacaucacagcaagucugugcugcuucccgucccuacgcugccugggcagggu

SEQ ID NO: 3943 - RNA, 22 nt, Homo sapiens
augcaccugggcaaggauucug

SEQ ID NO: 3944 - RNA, 84 nt, Homo sapiens; identical to SEQ ID NO: 2198

SEQ ID NO: 3945 - RNA, 22 nt, Homo sapiens
aauccuuugucccugggugaga

SEQ ID NO: 3946 - RNA, 84 nt, Homo sapiens; identical to SEQ ID NO: 1928

SEQ ID NO: 3947 - RNA, 21 nt, Homo sapiens
auccuugcuaucugggugcua

SEQ ID NO: 3948 - RNA, 86 nt, Homo sapiens; identical to SEQ ID NO: 3536

SEQ ID NO: 3949 - RNA, 23 nt, Homo sapiens
uagcagcgggaacaguucugcag

SEQ ID NO: 3950 - RNA, 71 nt, Homo sapiens
ugcccuagcagcgggaacaguucugcagugagcgaucggugcucugggguauuguuuccgcugccagggua

SEQ ID NO: 3951 - RNA, 21 nt, Homo sapiens
agacccuggucugcacucuau

SEQ ID NO: 3952 - RNA, 83 nt, Homo sapiens; identical to SEQ ID NO: 1508

SEQ ID NO: 3953 - RNA, 22 nt, Homo sapiens
gucaacacuugcugguuuccuc

SEQ ID NO: 3954 - RNA, 84 nt, Homo sapiens
gaugcacccagugggggagccaggaaguauugauguuucugccaguuuagcgucaacacuugcugguuuccucucuggagcauc

SEQ ID NO: 3955 - RNA, 21 nt, Homo sapiens
uaaggcacccuucugaguaga

SEQ ID NO: 3956 - RNA, 124 nt, Homo sapiens; identical to SEQ ID NO: 2850

SEQ ID NO: 3957 - RNA, 21 nt, Homo sapiens
uuuugcaccuuuuggagugaa

SEQ ID NO: 3958 - RNA, 94 nt, Homo sapiens
gugcuguguguagugcuucacuucaagaagugccaugcaugugucuagaaauauguuuugcaccuuuuggagugaaauaaugcacaacagauac

SEQ ID NO: 3959 - RNA, 23 nt, Homo sapiens
ugauuguagccuuuuggaguaga

SEQ ID NO: 3960 - RNA, 115 nt, Homo sapiens; identical to SEQ ID NO: 2164

SEQ ID NO: 3961 - RNA, 23 nt, Homo sapiens
ugauugguacgucuguggguaga

SEQ ID NO: 3962 - RNA, 94 nt, Homo sapiens; identical to SEQ ID NO: 2166

SEQ ID NO: 3963 - RNA, 23 nt, Homo sapiens
uacucaggagaguggcaaucaca

SEQ ID NO: 3964 - RNA, 74 nt, Homo sapiens; identical to SEQ ID NO: 298

SEQ ID NO: 3965 - RNA, 21 nt, Homo sapiens
gugucuuuugcucugcaguca

SEQ ID NO: 3966 - RNA, 87 nt, Homo sapiens; identical to SEQ ID NO: 1090

SEQ ID NO: 3967 - RNA, 22 nt, Homo sapiens
aagugcugucauagcugagguc

SEQ ID NO: 3968 - RNA, 84 nt, Homo sapiens
ucucagucuguggcacucagccuugagggcacuuucuggugccagaaugaaagugcugucauagcugagguccaaugacugagg

SEQ ID NO: 3969 - RNA, 22 nt, Homo sapiens
uucacagggaggugucauuuau

SEQ ID NO: 3970 - RNA, 127 nt, Homo sapiens
ggaugccacauucagccauucagugugcagugccuuucacagggaggugucauuuaugugaacuaaaauauaaauuucaccuuucugagaaggguaauguacagcaugcacugcauauguggugucc

SEQ ID NO: 3971 - RNA, 20 nt, Homo sapiens
auugacacuucugugaguag

SEQ ID NO: 3972 - RNA, 88 nt, Homo sapiens; identical to SEQ ID NO: 1076

SEQ ID NO: 3973 - RNA, 21 nt, Homo sapiens
gagugccuucuuuuggagcgu

SEQ ID NO: 3974 - RNA, 83 nt, Homo sapiens
ucucaugcagucauucuccaaaagaaagcacuuucuguugucugaaagcagagugccuucuuuuggagcguuacuguuugaga

SEQ ID NO: 3975 - RNA, 23 nt, Homo sapiens
caucuggagguaagaagcacuuu

SEQ ID NO: 3976 - RNA, 90 nt, Homo sapiens
ucucaggcugugaccaucuggagguaagaagcacuuucuguuuugugaaagaaaagaaagugcuuccuuucagaggguuacucuuugaga

SEQ ID NO: 3977 - RNA, 23 nt, Homo sapiens
aucgugcaucccuuuagaguguu

SEQ ID NO: 3978 - RNA, 87 nt, Homo sapiens
ucucaggcagugacccucuagauggaagcacugucuguuguauaaaagaaaagaucgugcaucccuuuagaguguuacuguuugaga

SEQ ID NO: 3979 - RNA, 22 nt, Homo sapiens
aucgugcauccuuuuagagugu

SEQ ID NO: 3980 - RNA, 95 nt, Homo sapiens
gaagaucucaggcagugacccucuagauggaagcacugucuguugucuaagaaaagaucgugcauccuuuuagaguguuacuguuugagaaaauc

SEQ ID NO: 3981 - RNA, 23 nt, Homo sapiens
ucucuggagggaagcacuuucug

SEQ ID NO: 3982 - RNA, 101 nt, Homo sapiens
gcgagaagaucucaugcugugacucucuggagggaagcacuuucuguugucugaaagaaaacaaagcgcuucucuuuagaguguuacgguuugagaaaagc

SEQ ID NO: 3983 - RNA, 23 nt, Homo sapiens
cucuagagggaagcacuuucucu

SEQ ID NO: 3984 - RNA, 87 nt, Homo sapiens
ucucaugcugugacccucuagagggaagcacuuucucuugucuaaaagaaaagaaagcgcuucucuuuagaggauuacucuuugaga

SEQ ID NO: 3985 - RNA, 23 nt, Homo sapiens
caaagugccucccuuuagagugu

SEQ ID NO: 3986 - RNA, 88 nt, Homo sapiens
ucccaugcugugacccuccaaagggaagcgcuuucuguuuguuuucucuuaaacaaagugccucccuuuagaguguuaccguuuggga

SEQ ID NO: 3987 - RNA, 21 nt, Homo sapiens
cuccagagggaaguacuuucu

SEQ ID NO: 3988 - RNA, 85 nt, Homo sapiens
cucaggcugugacccuccagagggaaguacuuucuguugucugagagaaaagaaagugcuucccuuuggacuguuucgguuugag

SEQ ID NO: 3989 - RNA, 23 nt, Homo sapiens
aaagugcuucucuuugguggguu

SEQ ID NO: 3990 - RNA, 87 nt, Homo sapiens
ucucaagcugugagucuacaaagggaagcccuuucuguugucuaaaagaaaagaaagugcuucucuuugguggguuacgguuugaga

SEQ ID NO: 3991 - RNA, 22 nt, Homo sapiens
aagugcuuccuuuuagaggguu

SEQ ID NO: 3992 - RNA, 87 nt, Homo sapiens
ucucaggcugugacccucuaaagggaagcgcuuucuguggucagaaagaaaagcaagugcuuccuuuuagaggguuaccguuuggga

SEQ ID NO: 3993 - RNA, 24 nt, Homo sapiens
acaaagugcuucccuuuagagugu

SEQ ID NO: 3994 - RNA, 90 nt, Homo sapiens
ucccaugcugugacccucuagaggaagcacuuucuguuuguugucugagaaaaaacaaagugcuucccuuuagaguguuaccguuuggga

SEQ ID NO: 3995 - RNA, 22 nt, Homo sapiens
acaaagugcuucccuuuagagu

SEQ ID NO: 3996 - RNA, 88 nt, Homo sapiens
ucccaugcugugacccucuagaggaagcacuuucuguuuguugucugagaaaaaacaaagugcuucccuuuagaguuacuguuuggga

SEQ ID NO: 3997 - RNA, 23 nt, Homo sapiens
aaaaugguucccuuuagaguguu

SEQ ID NO: 3998 - RNA, 87 nt, Homo sapiens
ucucaggcugugucccucuagagggaagcgcuuucuguugucugaaagaaaagaaaaugguucccuuuagaguguuacgcuuugaga

SEQ ID NO: 3999 - RNA, 21 nt, Homo sapiens
cuccagagggaugcacuuucu

SEQ ID NO: 4000 - RNA, 85 nt, Homo sapiens
cucaagcugugacucuccagagggaugcacuuucucuuaugugaaaaaaaagaaggcgcuucccuuuagagcguuacgguuuggg

SEQ ID NO: 4001 - RNA, 21 nt, Homo sapiens
cucuagagggaagcacuuucu

SEQ ID NO: 4002 - RNA, 65 nt, Homo sapiens
gugacccucuagagggaagcacuuucuguugaaagaaaagaacaugcauccuuucagaggguuac

SEQ ID NO: 4003 - RNA, 24 nt, Homo sapiens
cucuugagggaagcacuuucuguu

SEQ ID NO: 4004 - RNA, 83 nt, Homo sapiens
ucaggcugugacccucuugagggaagcacuuucuguugucugaaagaagagaaagugcuuccuuuuagaggcuuacugucuga

SEQ ID NO: 4005 - RNA, 24 nt, Homo sapiens
cucuagagggaagcgcuuucuguu

SEQ ID NO: 4006 - RNA, 85 nt, Homo sapiens
cucaggcugugacacucuagagggaagcgcuuucuguugucugaaagaaaggaaagugcauccuuuuagaguguuacuguuugag

SEQ ID NO: 4007 - RNA, 22 nt, Homo sapiens
ggagaaauuauccuuggugugu

SEQ ID NO: 4008 - RNA, 78 nt, Homo sapiens
auacuugaggagaaauuauccuugguguguucgcuuuauuuaugaugaaucauacaaggacaauuucuuuuugaguau

SEQ ID NO: 4009 - RNA, 22 nt, Homo sapiens
ugugacagauugauaacugaaa

SEQ ID NO: 4010 - RNA, 97 nt, Homo sapiens
cagaucucagacaucucggggaucaucaugucacgagauaccagugugcacuugugacagauugauaacugaaaggucugggagccacucaucuuca

SEQ ID NO: 4011 - RNA, 22 nt, Homo sapiens
ucggggaucaucaugucacgag

SEQ ID NO: 4012 - RNA, 97 nt, Homo sapiens; identical to SEQ ID NO: 4010

SEQ ID NO: 4013 - RNA, 22 nt, Homo sapiens
ugucuuacucccucaggcacau

SEQ ID NO: 4014 - RNA, 97 nt, Homo sapiens
ugaugcuuugcuggcuggugcagugccugagggaguaagagcccuguuguuguaagauagugucuuacucccucaggcacaucuccaacaagucucu

SEQ ID NO: 4015 - RNA, 21 nt, Homo sapiens
gcgacccauacuugguuucag

SEQ ID NO: 4016 - RNA, 96 nt, Homo sapiens
agaugugcucuccuggcccaugaaaucaagcgugggugagaccuggugcagaacgggaaggcgacccauacuugguuucagaggcugugagaauaa

SEQ ID NO: 4017 - RNA, 23 nt, Homo sapiens
guuugcacgggugggccuugucu

SEQ ID NO: 4018 - RNA, 98 nt, Homo sapiens
agaaugggcaaaugaacaguaaauuuggaggccuggggcccucccugcugcuggagaaguguuugcacgggugggccuugucuuugaaaggaggugga

SEQ ID NO: 4019 - RNA, 22 nt, Homo sapiens
caaaguuuaagauccuugaagu

SEQ ID NO: 4020 - RNA, 97 nt, Homo sapiens
cuucauccaccaguccuccaggaacaucaaggaucuuaaacuuugccagagcuacaaaggcaaaguuuaagauccuugaaguuccugggggaaccau

SEQ ID NO: 4021 - RNA, 19 nt, Homo sapiens
aggcacggugucagcaggc

SEQ ID NO: 4022 - RNA, 94 nt, Homo sapiens
cgggcagcgggugccaggcacggugucagcaggcaacauggccgagaggccggggccuccgggcggcgccguguccgcgaccgcguacccugac

SEQ ID NO: 4023 - RNA, 22 nt, Homo sapiens
ggcuggcucgcgaugucuguuu

SEQ ID NO: 4024 - RNA, 97 nt, Homo sapiens
ccaguggcgcaauggauaacgcgucugacuacggaucagaagauucuagguucgacuccuggcuggcucgcgaugucuguuuugccacacuugaccc

SEQ ID NO: 4025 - RNA, 19 nt, Homo sapiens
gggcgccugugaucccaac

SEQ ID NO: 4026 - RNA, 94 nt, Homo sapiens
gcuaggcgugguggcgggcgccugugaucccaacuacucaggaggcuggggcagcagaaucgcuugaacccgggaggcgaagguugcagugagc

SEQ ID NO: 4027 - RNA, 20 nt, Homo sapiens
guccgcucggcgguggccca

SEQ ID NO: 4028 - RNA, 95 nt, Homo sapiens
gucgaggccguggcccggaaguggucggggccgcugcgggcggaagggcgccugugcuucguccgcucggcgguggcccagccaggcccgcggga

SEQ ID NO: 4029 - RNA, 21 nt, Homo sapiens
cacgcucaugcacacacccac

SEQ ID NO: 4030 - RNA, 96 nt, Homo sapiens
gggaccugcgugggugcgggcgugugagugugugugugugagugugugucgcuccggguccacgcucaugcacacacccacacgcccacacucagg

SEQ ID NO: 4031 - RNA, 23 nt, Homo sapiens
auucuaauuucuccacgucuuug

SEQ ID NO: 4032 - RNA, 98 nt, Homo sapiens
uacaauccaacgaggauucuaauuucuccacgucuuugguaauaagguuuggcaaagauguggaaaaauuggaauccucauucgauugguuauaacca

SEQ ID NO: 4033 - RNA, 21 nt, Homo sapiens
uagauaaaauauugguaccug

SEQ ID NO: 4034 - RNA, 96 nt, Homo sapiens
ugggggagugaagaguagauaaaauauugguaccugaugaaucugaggccagguuucaauacuuuaucugcucuucauuuccccauaucuacuuac

SEQ ID NO: 4035 - RNA, 23 nt, Homo sapiens
uuacaguuguucaaccaguuacu

SEQ ID NO: 4036 - RNA, 98 nt, Homo sapiens
aucugugcucuuugauuacaguuguucaaccaguuacuaaucuaacuaauuguaacugguugaacaacugaacccaaagggugcaaaguagaaacauu

SEQ ID NO: 4037 - RNA, 22 nt, Homo sapiens
uuaugguuugccugggacugag

SEQ ID NO: 4038 - RNA, 97 nt, Homo sapiens
uagggugaccagccauuaugguuugccugggacugaggaauuugcugggauaugucaguuccaggccaaccaggcugguuggucucccugaagcaac

SEQ ID NO: 4039 - RNA, 19 nt, Homo sapiens
ugggcguaucuguaugcua

SEQ ID NO: 4040 - RNA, 94 nt, Homo sapiens
uggggugucugugcuauggcagcccuagcacacagauacgcccagagaaagccugaacguugggcguaucuguaugcuagggcugcuguaacaa

SEQ ID NO: 4041 - RNA, 24 nt, Homo sapiens
ucagaacaaaugccgguucccaga

SEQ ID NO: 4042 - RNA, 99 nt, Homo sapiens
uccagccugugcccagcagccccugagaaccacgucugcucugagcuggguacugccuguucagaacaaaugccgguucccagacgcugccagcuggcc

SEQ ID NO: 4043 - RNA, 22 nt, Homo sapiens
uugugucaauaugcgaugaugu

SEQ ID NO: 4044 - RNA, 97 nt, Homo sapiens
uauuaugccaugacauugugucaauaugcgaugauguguugugauggcacagcgucaucacguggugacgcaacaucaugacguaagacgucacaac

SEQ ID NO: 4045 - RNA, 22 nt, Homo sapiens
uacgucaucguugucaucguca

SEQ ID NO: 4046 - RNA, 97 nt, Homo sapiens
gcuugaugaugcugcugaugcuggcggugaucccgauggugugagcuggaaauggggugcuacgucaucguugucaucgucaucaucaucauccgag

SEQ ID NO: 4047 - RNA, 20 nt, Homo sapiens
guugugucaguuuaucaaac

SEQ ID NO: 4048 - RNA, 95 nt, Homo sapiens; identical to SEQ ID NO: 656

SEQ ID NO: 4049 - RNA, 23 nt, Homo sapiens
uaaaucccauggugccuucuccu

SEQ ID NO: 4050 - RNA, 83 nt, Homo sapiens
gcccuagcuugguucuaaaucccauggugccuucuccuugggaaaaacagagaaggcacuaugagauuuagaaucaaguuagg

SEQ ID NO: 4051 - RNA, 25 nt, Homo sapiens
aggggugguguugggacagcuccgu

SEQ ID NO: 4052 - RNA, 100 nt, Homo sapiens
gggccaaggugggccaggggugguguugggacagcuccguuuaaaaaggcaucuccaagagcuuccaucaaaggcugccucuuggugcagcacagguaga

SEQ ID NO: 4053 - RNA, 25 nt, Homo sapiens
gcugggcagggcuucugagcuccuu

SEQ ID NO: 4054 - RNA, 100 nt, Homo sapiens
ucccaucuggacccugcugggcagggcuucugagcuccuuagcacuagcaggaggggcuccaggggcccucccuccauggcagccaggacaggacucuca

SEQ ID NO: 4055 - RNA, 20 nt, Homo sapiens
auggagauagauauagaaau

SEQ ID NO: 4056 - RNA, 95 nt, Homo sapiens
auauauaucuauaucuagcuccguauauauauauauauauauauagauaucuccauauauauggagauagauauagaaauaaaacaagcaaagaa

SEQ ID NO: 4057 - RNA, 22 nt, Homo sapiens
uaguaccaguaccuuguguuca

SEQ ID NO: 4058 - RNA, 97 nt, Homo sapiens
aaugcuguuucaagguaguaccaguaccuuguguucaguggaaccaagguaaacacaagguauugguauuaccuugagauagcauuacaccuaagug

SEQ ID NO: 4059 - RNA, 20 nt, Homo sapiens
ucuaguaagaguggcagucg

SEQ ID NO: 4060 - RNA, 95 nt, Homo sapiens
auagcuguugugucacuuccucaugcugacauauuuacuagaggguaaaauuaauaaccuucuaguaagaguggcagucgaagggaagggcucau

SEQ ID NO: 4061 - RNA, 24 nt, Homo sapiens
aaagacauaggauagagucaccuc

SEQ ID NO: 4062 - RNA, 99 nt, Homo sapiens
ugggugaaaggaaggaaagacauaggauagagucaccucuguccucuguccucuaccuauagaggugacuguccuaugucuuuccuuccucuuaccccu

SEQ ID NO: 4063 - RNA, 23 nt, Homo sapiens
aauggcgccacuaggguugugca

SEQ ID NO: 4064 - RNA, 98 nt, Homo sapiens
acgaauggcuaugcacugcacaacccuaggagagggugccauucacauagacuauaauugaauggcgccacuaggguugugcagugcacaaccuacac

SEQ ID NO: 4065 - RNA, 21 nt, Homo sapiens
uugaaacaaucucuacugaac

SEQ ID NO: 4066 - RNA, 96 nt, Homo sapiens
uucauuccuucaguguugaaacaaucucuacugaaccagcuucaaacaaguucacuggaguuuguuucaauauugcaagaaugauaagauggaagc

SEQ ID NO: 4067 - RNA, 22 nt, Homo sapiens
uggugggccgcagaacaugugc

SEQ ID NO: 4068 - RNA, 81 nt, Homo sapiens; identical to SEQ ID NO: 848

SEQ ID NO: 4069 - RNA, 22 nt, Homo sapiens
auaauacaugguuaaccucuuu

SEQ ID NO: 4070 - RNA, 97 nt, Homo sapiens
aacuaugcaaggauauuugaggagagguuauccguguuauguucgcuucauucaucaugaauaauacaugguuaaccucuuuuugaauaucagacuc

SEQ ID NO: 4071 - RNA, 22 nt, Homo sapiens
uacccauugcauaucggaguug

SEQ ID NO: 4072 - RNA, 97 nt, Homo sapiens; identical to SEQ ID NO: 1378

SEQ ID NO: 4073 - RNA, 22 nt, Homo sapiens
uggaagacuagugauuuuguug

SEQ ID NO: 4074 - RNA, 110 nt, Homo sapiens; identical to SEQ ID NO: 1022

SEQ ID NO: 4075 - RNA, 23 nt, Homo sapiens
ugcaccaugguugucugagcaug

SEQ ID NO: 4076 - RNA, 109 nt, Homo sapiens
gcuuuuauauuguagguuuuugcucaugcaccaugguugucugagcaugcagcaugcuugucugcucauaccccaugguuucugagcaggaaccuucauugucuacugc

SEQ ID NO: 4077 - RNA, 23 nt, Homo sapiens
caguaacaaagauucauccuugu

SEQ ID NO: 4078 - RNA, 94 nt, Homo sapiens
guucuguuauuugcagucaguaacaaagauucauccuuguguccaucaugcaacaaggagaaucuuugucacuuaguguaauuaauagcuggac

SEQ ID NO: 4079 - RNA, 23 nt, Homo sapiens
ucuuugguuaucuagcuguauga

SEQ ID NO: 4080 - RNA, 90 nt, Homo sapiens
ggaggcccguuucucucuuugguuaucuagcuguaugagugccacagagccgucauaaagcuagauaaccgaaaguagaaaugauucuca

SEQ ID NO: 4081 - RNA, 21 nt, Homo sapiens
uaaagcuagauaaccgaaagu

SEQ ID NO: 4082 - RNA, 89 nt, Homo sapiens
cgggguugguuguuaucuuugguuaucuagcuguaugagugguguggagucuucauaaagcuagauaaccgaaaguaaaaauaacccca

SEQ ID NO: 4083 - RNA, 21 nt, Homo sapiens
uauugcacuugucccggccug

SEQ ID NO: 4084 - RNA, 75 nt, Homo sapiens; identical to SEQ ID NO: 1072

SEQ ID NO: 4085 - RNA, 21 nt, Homo sapiens
uauugcacucgucccggccuc

SEQ ID NO: 4086 - RNA, 96 nt, Homo sapiens; identical to SEQ ID NO: 2914

SEQ ID NO: 4087 - RNA, 22 nt, Homo sapiens
aaagugcuguucgugcagguag

SEQ ID NO: 4088 - RNA, 80 nt, Homo sapiens; identical to SEQ ID NO: 1254

SEQ ID NO: 4089 - RNA, 22 nt, Homo sapiens
uucaacggguauuuauugagca

SEQ ID NO: 4090 - RNA, 81 nt, Homo sapiens
aacacagugggcacucaauaaaugucuguugaauugaaaugcguuacauucaacggguauuuauugagcacccacucugug

SEQ ID NO: 4091 - RNA, 22 nt, Homo sapiens
uuuggcacuagcacauuuuugc

SEQ ID NO: 4092 - RNA, 78 nt, Homo sapiens
uggccgauuuuggcacuagcacauuuuugcuugugucucuccgcucugagcaaucaugugcagugccaauaugggaaa

SEQ ID NO: 4093 - RNA, 22 nt, Homo sapiens
ugagguaguaaguuguauuguu

SEQ ID NO: 4094 - RNA, 119 nt, Homo sapiens
aggauucugcucaugccagggugagguaguaaguuguauuguugugggguagggauauuaggccccaauuagaagauaacuauacaacuuacuacuuucccugguguguggcauauuca

SEQ ID NO: 4095 - RNA, 22 nt, Homo sapiens
aacccguagauccgaucuugug

SEQ ID NO: 4096 - RNA, 81 nt, Homo sapiens; identical to SEQ ID NO: 854

SEQ ID NO: 4097 - RNA, 22 nt, Homo sapiens
cacccguagaaccgaccuugcg

SEQ ID NO: 4098 - RNA, 70 nt, Homo sapiens; identical to SEQ ID NO: 1032

SEQ ID NO: 4099 - RNA, 22 nt, Homo sapiens
caaccuggaggacuccaugcug

1. A method of assessing a patient comprising:
detecting the presence of a non-lymphoid cell in a lymph node sample by evaluating the expression levels of one or more miRNAs differentially expressed in non-lymphoid tissue as compared to lymph node tissue.

2. The method of claim 1, further comprising providing a diagnosis, prognosis, or staging of the patient condition or disease.

3. The method of claim 1, wherein one or more miRNA is selected from Table 4, 5, 6, 10, 11, 12, 13, 14, 16, 17, 18, 19, 20, 21, 22, 23, 24, 25, 26, 27, 28, 29, 30, 31, 32, 33, 34, 35, 36, 37, 39, 40, 41, 43, and/or 44.

4. The method of claim 3, further comprising combining the expression levels of two or more miRNAs selected from Table 4, 5, 6, 10, 11, 12, 13, 14, 16, 17, 18, 19, 20, 21, 22, 23, 24, 25, 26, 27, 28, 29, 30, 31, 32, 33, 34, 35, 36, 37, 39, 40, 41, 43, and/or 44.

5. The method of claim 1, wherein the lymph node sample is associated with cancer or suspected cancer.

6. The method of claim 5, wherein the lymph node sample is obtained from a lymph node positioned locally to a cancer or suspected cancer.

7. The method of claim 6, wherein the lymph node is a sentinel lymph node (SLN).

8. (canceled)

9. (canceled)

10. The method of claim 1, wherein detection is by RT-PCR and/or hybridization.

11. The method of claim 1, wherein the non-lymphoid tissue is cervix, skin, colon, breast, bladder, esophagus, liver, ovary, prostate, lung, pancreas, thyroid, kidney, stomach, testicle, uterus, spleen, tongue, brain, thymus, trachea, small intestine and/or a cancer originating from the non-lymphoid tissue.

12-14. (canceled)

15. The method of claim 1, wherein one or more miRNAs are selected from hsa-miR-182, hsa-miR-183, hsa-miR-189, hsa-miR-200a, hsa-miR-200b, hsa-miR-200c, hsa-miR-203, hsa-miR-205, hsa-miR-224, hsa-miR-429, hsa-miR-141, hsa-miR-375, hsa-miR-211, hsa-miR-509, hsa-miR-508, hsa-miR-514 hsa-miR-584, hsa-miR-592, hsa-miR-192, hsa-miR-194, or hsa-miR-215.

16. The method of claim 15, further comprising combining the expression levels of two or more miRNAs selected from hsa-miR-182, hsa-miR-183, hsa-miR-189, hsa-miR-200a, hsa-miR-200b, hsa-miR-200c, hsa-miR-203, hsa-miR-205, hsa-miR-224, hsa-miR-429, hsa-miR-141, hsa-miR-375, hsa-miR-211, hsa-miR-509, hsa-miR-508, hsa-miR-514, hsa-miR-584, hsa-miR-592, hsa-miR-192, hsa-miR-194, or hsa-miR-215.

17-83. (canceled)

84. A method of assessing a patient comprising the steps of:
(a) evaluating a lymph node sample for one or more miRNAs differentially expressed in two or more non-lymphoid tissue as compared to lymph node tissue; and
(b) determining if a non-lymphoid cell is present in the lymph node sample by evaluating the expression levels of the differentially expressed miRNAs.

85. The method of claim 84, wherein the two non-lymphoid tissues are selected from cervix, skin, colon, breast, bladder, esophagus, liver, ovary, prostate, lung, pancreas, thyroid, kidney, stomach, testicle, uterus, spleen, tongue, brain, thymus, trachea, small intestine and/or a cancer originating from the non-lymphoid tissue.

86. The method of claim 85, wherein one or more miRNA that is differentially expressed in two or more non-lymphoid tissues is selected from Table 37.

87. The method of claim 86, further comprising combining the expression levels of two or more miRNAs selected from Table 37.

88. The method of claim 85, wherein one or more miRNA that is differentially expressed in two or more non-lymhoid tissues is selected from hsa-miR-141, hsa-miR-200a, hsa-miR-200b, hsa-miR-200c, hsa-miR-203, or hsa-miR-429.

89. The method of claim 88, further comprising combining the expression levels of two or more miRNAs selected from hsa -miR-141, hsa -miR-200a, hsa -miR-200b, hsa -miR-200c, hsa -miR-203, or hsa -miR-429.

90. A kit comprising amplification primers and/or hybridization probes for one or more miRNA selected from Table 4, 5, 6, 10, 11, 12, 13, 14, 16, 17, 18, 19, 20, 21, 22, 23, 24, 25, 26, 27, 28, 29, 30, 31, 32, 33, 34, 35, 36, 37, 39, 40, 41, 43, and/or 44.

91. The kit of claim 90, comprising amplification primers and/or hybridization primers for two or more miRNA selected from Table 4, 5, 6, 10, 11, 12, 13, 14, 16, 17, 18, 19, 20, 21, 22, 23, 24, 25, 26, 27, 28, 29, 30, 31, 32, 33, 34, 35, 36, 37, 39, 40, 41, 43, and/or 44.

92. The kit of claim 91, comprising amplification primers and/or hybridization primers for 5 or more miRNA selected from Table 4, 5, 6, 10, 11, 12, 13, 14, 16, 17, 18, 19, 20, 21, 22, 23, 24, 25, 26, 27, 28, 29, 30, 31, 32, 33, 34, 35, 36, 37, 39, 40, 41, 43, and/or 44.
